(19) United States
(12) Patent Application Publication
(10) Pub. No.: US 2003/0221205 A1
(43) Pub. Date: Nov. 27, 2003

(54) Olfactory and pheromones G-protein coupled receptors

(76) Inventor: Alex Veithen, Nivelles (BE)

Correspondence Address: PALMER & DODGE, LLP, KATHLEEN M. WILLIAMS, 111 HUNTINGTON AVENUE, BOSTON, MA, 02199, US

(21) Appl. No.: 10/387,629

(22) Filed: Mar. 13, 2003

Related U.S. Application Data
(63) Continuation-in-part of application No. PCT/BE01/00162, filed on Sep. 21, 2001.

(30) Foreign Application Priority Data
Sep. 22, 2000 (EP) 008702311.0

(51) Int. Cl. A01K 67/027; C12Q 1/68; C07H 21/04; C07K 14/705; C12P 21/02; C12N 5/06; A61K 38/17

(52) U.S. Cl. 800/14; 435/6; 435/69.1; 435/320.1; 435/325; 530/350; 536/23.5; 514/12

(57) ABSTRACT

The present invention is related to an olfactory or pheromone G-protein coupled receptor having an amino acid sequence which presents 95% sequence identity with the sequence SEQ ID NO. 1.

### PRIORITY

[0001] This application claims priority under 35 U.S.C. §120 as a continuation-in-part of International Application number PCT/BE01/00162, filed Sep. 21, 2001, which claims priority to European application number 00870211.0, filed Sep. 22, 2000.

### FIELD OF THE INVENTION

[0002] The present invention is related to newly identified, isolated and purified members of the family of olfactory ligand and the family of pheromone ligand G-protein-coupled receptors (preferably human) as well as to the various uses that can be made of said receptors.

[0003] The invention is also related to the polynucleotides sequences encoding the pheromone receptors of the invention.

[0004] The invention is further related to methods using receptor polypeptides and polynucleotides applicable to diagnostic and treatment in receptor-mediated disorders.

[0005] The invention is further related to ligand-screening methods using the receptor polypeptides and polynucleotides, to identify agonists and antagonists useful to improve flavors or perfumes. Ligands of the pheromone receptors of the invention may also be used in the prevention and/or treatment of various disorders.

[0006] The invention further encompasses agonists and antagonists based on the said olfactory and pheromones receptor polypeptides and polynucleotides as well as biosensors comprising said receptor polypeptides.

[0007] The invention is further related to procedures for producing the receptor polypeptides and polynucleotides according to the invention, preferably by genetic recombinant methods.

### BACKGROUND OF THE INVENTION

[0008] G-protein coupled receptors (GPCRs) are proteins responsible for transducing a signal within a cell. GPCRs have usually seven transmembrane domains. Upon binding of a ligand to an extra-cellular portion or fragment of a GPCR, a signal is transduced within the cell that results in a change in a biological or physiological property or behaviour of the cell. GPCRs, along with G-proteins and effectors (intracellular enzymes and membrane channels modulated by G-proteins), are the components of a modular signaling system that connects the state of intra-cellular second messengers to extra-cellular inputs.

[0009] GPCR genes and gene products are potential causative agents of disease and these receptors seem to be of critical importance to both the central nervous system and peripheral physiological processes.

[0010] The GPCR protein superfamily is represented in five families: Family I, receptors typified by rhodopsin and the beta2-adrenergic receptor and currently represented by over 200 unique members; Family II, the parathyroid hormone/calcitonin/secretin receptor family; Family III, the metabotropic glutamate receptor family, Family IV, the CAMP receptor family, important in the chemotaxis and development of D. discoideum; and Family V, the fungal mating pheromone receptor such as STE2.

[0011] G proteins represent a family of heterotrimeric proteins composed of α, β and γ subunits, that bind guanine nucleotides. These proteins are usually linked to cell surface receptors (receptors containing seven transmembrane domains).

[0012] Following ligand binding to the GPCR, a conformational change is transmitted to the G protein, which caused the α-subunit to exchange a bound GDP molecule for a GTP molecule and to dissociate from the βγ-subunits.

[0013] The GTP-bound form of the α, β and γ-subunits typically functions as an effector-modulating moiety, leading to the production of second messengers, such as cAMP (e.g. by activation of adenyl cyclase), diacylglycerol or inositol phosphates.

[0014] Greater than 20 different types of α-subunits are known in humans. These subunits associate with a small pool of β and γ subunits. Examples of mammalian G proteins include Gi, Go, Gq, Gs and Gt. G proteins are described extensively in Lodish et al., Molecular Cell Biology, (Scientific American Books Inc., New York, N.Y., 1995), the contents of which are incorporated herein by reference.

[0015] Known and unknown GPCRs constitute now major targets for drug action and development.

[0016] More than 300 GPCRs have been cloned thus far and it is generally assumed that it exists well over 1000 such receptors. Mechanistically, approximately 50-60% of all clinically relevant drugs act by modulating the functions of various GPCRs (Cudermann et al., J. Mol. Med., Vol. 73, pages 51-63, 1995).

### SUMMARY OF THE INVENTION

[0017] The present invention is related to newly isolated and purified identified members of olfactory and pheromone GPCRs (SEQ ID NO. 1 to SEQ. ID NO. 254) as well as to polynucleotide sequences, including recombinant sequences, encoding said receptors, described hereafter.

[0018] The present invention is also related to nucleotide and/or amino acid sequences homologous to the sequences corresponding to the receptors described hereafter.

[0019] Homologous sequences mean sequences which present a high sequence identity (which present an identity higher than 75%, 80%, 85%, 90% or 95%) with the complete sequence described hereafter.

[0020] Homologous sequences of a sequence according to the invention may include an amino acid or nucleotide sequence encoding a similar receptor which exists in other animal species (rat, mouse, cat, dog, etc.) or in specific human population groups, but which are involved in the same biochemical pathway(s).

[0021] Such homologous sequences may comprise additions, deletions or substitutions of one or more amino acids or nucleotides, which do not substantially alter the functional characteristics of the receptor according to the invention. For example, homologs of GPCRs of the present invention will have at least 90% of the activity of wild-type full length human olfactory and/or pheromone GPCRs of the invention.

[0022] Such homologous sequences can also be nucleotide sequences of more than 400, 600, 800 or 1000 nucleotides which are able to hybridize to the complete nucleic acid sequences of SEQ ID Nos.: 1-254 under stringent hybridization conditions (such as the ones described by SAMBROOK et al., Molecular Cloning, Laboratory Manuel, Cold Spring, Harbor Laboratory press, New York). An example of “stringent hybridization conditions” is as follows: hybridize in 50% formamide, 5×SSC, 50 mM sodium phosphate (pH 6.8), 0.1% sodium pyrophosphate, 5×Denhardt's solution, 50 μg/ml sonicated salmon sperm DNA, 0.1% SDS and 10% dextran sulfate at 42° C.; and wash at 42° C. (or higher, e.g., up to two degrees C. below the Tₘ of the perfect complement of the probe sequence) in 0.2×SSC and 0.1% SDS.

[0023] Another aspect of the present invention is related to a specific active portion of said sequences or a libraries of active portions of these sequences. Active portions could be partial or deleted receptors which comprise modifications (e.g., point mutations) or deletions upon the complete nucleotide or amino acid sequences and which still maintain the active site(s) necessary for the binding of a specific ligand able to interact with said receptors.

[0024] As used herein, an “active portion” refers to a portion of a sequence that is of sufficient size to exhibit normal or near normal pharmacology (e.g., receptor activity, the response to an activator or inhibitor, or ligand binding are at least 90% of the level of activity, response, or binding exhibited by a wild type receptor). “A portion” as it refers to a sequence encoding a receptor, refers to less than 100% of the sequence (i.e., 99, 90, 80, 70, 60, 50% etc . . . ). The active portion could be a receptor which comprises a partial deletion of the complete nucleotide or amino acid sequence and which still maintains the active site(s) and protein domain(s) necessary for the binding of and interaction with a specific ligand.

[0025] Homologous sequences of the sequences according to the invention may comprise similar receptors which exist in other animal (vertebrates, preferably mammalian) or specific human populations, but which are involved in the same biochemical pathway.

[0026] Such homologous sequences may comprise addition, deletion or substitution of one or more amino acids or nucleotides, which does not substantially alter the functional characteristics of the receptor(s) according to the invention in order to form preferably a hybrid polypeptide with another transmembrane protein, suitable for rapid ligand screening.

[0027] Thus, the invention encompasses also a receptor and corresponding nucleotide sequence which may be derived from olfactory neurons or olfactory epithelium, having exactly the same amino acid or nucleotide sequences as shown in the enclosed sequence listing (SEQ ID Nos 1-254).

[0028] The invention is preferably related to human receptors characterized by the complete nucleotide and amino acid sequences described hereafter, agonist and antagonist compounds or inhibitors, and antibodies or specific hypervariable portions thereof that bind specifically to the receptors (i.e. that have at least a 10 fold greater affinity for said receptors than any other naturally occurring antibody). The invention relates, with particularity to antibodies made by a process comprising the injection of a pharmaceutically acceptable preparation of an amino acid sequence of a receptor according to the invention (or an active portion thereof) into a animal capable of producing antibodies directed against said receptor. Alternatively, antibody polypeptide molecules may be generated by injecting an animal with a DNA expression vector comprising a nucleic acid sequence encoding a receptor polypeptide of the invention, and appropriate control sequences, such that upon expression of the receptor, an immune response is raised in the host animal, thereby generating antibody polypeptide molecules to the receptor polypeptide.

[0029] For instance, a monoclonal antibody to the receptor according to the invention may be obtained by injecting an expression plasmid comprising the DNA encoding said receptor into a non-human mammal and than fusing mouse spleen cells with myeloma cells.

[0030] The present invention is also related to a polynucleotide molecule encoding an olfactory and/or pheromone receptor polypeptide according to the invention, possibly linked to other expression sequences and incorporated into a vector (e.g., plasmid, virus such as an adenovirus, liposomes, cationic vesicles). The invention also relates to host cells transformed by such a vector.

[0031] The present invention is also related to the recombinant, preferably human, receptor according to the invention, produced by such host cells according to the methods well known by the person skilled in the art.

[0032] The present invention is also related to a transgenic non human mammal comprising a partial or total deletion of the genetic sequences encoding the receptor according to the invention, preferably a non human mammal comprising an homologous recombination “knock-out” of the nucleotide sequences (polynucleotides) according to the invention or a transgenic non human mammal overexpressing above natural level said nucleotide sequences (polynucleotides).

[0033] A transgenic non human mammal can be obtained by methods well known by the person skilled in the art, for instance by the one described in the document WO98/20112 using classical techniques based upon the transfection of embryonic stem cells, preferably according to the method described by Carmeliet et al., Nature, Vol. 380, p. 435-439, 1996.

[0034] Preferably, a transgenic non-human mammal overexpressing the polynucleotides according to the invention or portions thereof comprises the polynucleotides or active portions thereof incorporated in a DNA construct with an inducible promoter allowing its overexpression and possibly tissues and other specific regulatory elements.

[0035] As used herein. “overexpress” refers to a level that is at least 2-fold, preferably 5-fold, more preferably 10-fold and most preferably 100-fold or more (i.e., 150-fold, 200-fold, 250-fold, 500-fold, 1000-fold, 10,000-fold etc..) as compared to the level of expression of the endogenous receptor in its normal native context. A transgenic non-human mammal according to the invention will express the transgene in at least one tissue or cell type but can express a transgene (e.g., a transgene encoding a pheromone receptor of the present invention) in all tissues and cells.

[0036] Another aspect of the present invention is related to a method for screening for compounds which bind to the receptor polypeptide molecules according to the invention, said method comprising providing a cell containing a nucleic acid molecule encoding an olfactory/pheromone receptor of the invention or a portion thereof and expressing the receptor or portion thereof; exposing said cell to a candidate compound; and detecting the presence of a compound bound to said receptor or portion thereof, thereby determining whether said compound binds to said receptor or portion thereof.

[0037] In one embodiment, the method further comprises the step of preparing a cell extract from the cell transfected with said nucleic acid molecule, isolating a membrane fraction of the cell extract, and contacting the candidate compound with the membrane fraction under conditions permitting binding of the compound to said fraction.

[0038] In a further embodiment, the invention comprises isolating and/or recovering the candidate compound which binds to the receptor.

[0039] The present invention provides further, a method for identifying a compound as a ligand, agonist, or antagonist of a GPCR according to the invention comprising; providing a cell containing a nucleic acid molecule encoding an olfactory/pheromone receptor of the invention or a portion thereof and expressing the receptor or portion thereof; exposing said cell to a candidate compound; and detecting a signaling activity of the receptor or portion thereof, wherein if a signaling activity is detected, then the candidate compound is identified as a ligand, agonist, or antagonist of the GPCR.

[0040] In a further embodiment, the invention comprises isolating and/or recovering the candidate compound which is a ligand of a receptor of the invention and which is identified by the above method.

[0041] As used herein, an “antagonist” is a ligand which competitively binds to a receptor at the same site as an agonist, but does not activate an intracellular response initiated by an active form of the receptor. An antagonist thereby inhibits the intracellular response induced by an agonist by at least 10%, preferably 15-25%, more preferably 25-50% and most preferably, 50-100%, as compared to the intracellular response in the presence of an agonist and in the absence of an antagonist.

[0042] As used herein, an “agonist” refers to a ligand that activates an intracellular response when it binds to a receptor at concentrations equal to or lower than angiopeptin concentrations which induce an intracellular response. An agonist according to the invention can increase the intracellular response mediated by a receptor by at least 2-fold, preferably 5-fold, more preferably 10-fold and most preferably 100-fold or more (i.e., 150-fold, 200-fold, 250-fold, 500-fold, 1000-fold, 10,000-fold etc . . . ), as compared to the intracellular response in the absence of agonist. An agonist according to the invention may decrease internalization of a cell surface receptor such that the cell surface expression of a receptor is increased by at least 2-fold, preferably 5-fold, more preferably 10-fold and most preferably, 100-fold or more (i.e., 150-fold, 200-fold, 250-fold, 500-fold, 1000-fold, 10,000-fold etc . . . ), as compared to the number of cell surface receptors present on the surface of a cell in the absence of an agonist. In another embodiment of the invention, an agonist stabilizes a cell surface receptor and increases the cell surface expression of a receptor by at least 2-fold, preferably 5-fold, more preferably 10-fold and most preferably, 100-fold or more (i.e., 200-fold, 250-fold, 500-fold, 1000-fold, 10,000-fold etc . . . ), as compared to the number of cell surface receptors present on the surface of a cell in the absence of agonist.

[0043] An “inhibitor” compound according to the invention is a molecule directed against the receptor or against the natural ligand for the receptor that decreases the binding of the ligand to the receptor by at least 10%, preferably 15-25%, more preferably 25-50% and most preferably, 50-100%. An “inhibitor” compound of the invention can decrease the intracellular response induced by an agonist by at least 10%, preferably 15-25%, more preferably 25-50% and most preferably, 50-100%. An “inhibitor” also refers to a nucleotide sequence encoding an inhibitor compound of the invention.

[0044] As used herein, the term “receptor signaling activity” refers to the initiation or propagation of signaling by an olfactory/pheromone receptor polypeptide of the invention. Receptor signaling activity is monitored by measuring a detectable step in a signaling cascade by assaying one or more of the following: stimulation of GDP for GTP exchange on a G protein; alteration of adenylate cyclase activity; protein kinase C modulation; phosphatidylinositol breakdown (generating second messengers diacylglycerol, and inositol triphosphate); intracellular calcium flux; activation of MAP kinases; modulation of tyrosine kinases; or modulation of gene or reporter gene activity. A detectable step in a signaling cascade is considered initiated or mediated if the measurable activity is altered by 10% or more above or below baseline. The measurable activity can be measured directly, as in, for example, measurement of cAMP or diacylglycerol levels. Alternatively, the measurable activity can be measured indirectly, as in, for example, a reporter gene assay.

[0045] As used herein, “ligand” refers to a moiety that is capable of associating or binding to a receptor. According to the method of the invention, a ligand and a receptor have a binding constant that is sufficiently strong to allow detection of binding by an assay method that is appropriate for detection of a ligand binding to a receptor (e.g. a second messenger assay to detect an increase or decrease in the production of a second messenger in response to ligand binding to the receptor, a binding assay to measure protein-ligand binding or an immunoassay to measure antibody-antigen interactions). A ligand according to the invention includes the natural ligand that binds a receptor, or a ligand may be any nucleotide, antibody, antigen, enzyme, peptide, polypeptide or nucleic acid capable of binding to the receptor. According to the method of the invention, a ligand and receptor specifically bind to each other (e.g. via covalent or hydrogen bonding or via an interaction between, for example, a protein and a ligand, an antibody and an antigen or protein subunits). Specifically, a ligand according to the invention includes an odorant, flavor, or pheromone.

[0046] As used herein, the terms “change”, “difference”, “decrease”, or “increase” as applied to e.g., binding or signaling activity or amount of a substance refer to an at least 10% increase or decrease in binding, signaling activity, or for example, level of mRNA, polypeptide or ligand relative to a standard in a given assay.

[0047] As used herein, the “second messenger assay” preferably comprises the measurement of guanine nucleotide binding or exchange, adenylate cyclase, intra-cellular cAMP, intracellular inositol phosphate, intra-cellular diacylglycerol concentration, intracellular calcium concentration (e.g., via an aequorin based assay), arachinoid acid concentration, MAP kinase(s) or tyrosine kinase(s), protein kinase C activity, or reporter gene expression according to methods known in the art and defined herein.

[0048] As used herein, the term “second messenger” refers to a molecule, generated or caused to vary in concentration by the activation of a G-Protein Coupled Receptor, that participates in the transduction of a signal from that GPCR. Non-limiting examples of second messengers include cAMP, diacylglycerol, inositol triphosphate, arachidonic acid release, inositol triphosphates and intracellular calcium. The term “change in the level of a second messenger” refers to an increase or decrease of at least 10% in the detected level of a given second messenger relative to the amount detected in an assay performed in the absence of a candidate modulator.

[0049] As used herein, the term “binding” refers to the physical association of a ligand (e.g., angiopeptin, or an antibody) with a receptor (e.g., pheromone GPCR). As the term is used herein, binding is “specific” if it occurs with an EC₅₀ or a K_{d} of 1 mM less, generally in the range of 1 mM to 10 nM. For example, binding is specific if the EC₅₀ or K_{d} is 1 mM, 500 μM, 100 μM, 10 μM, 9.5 μM, 9 μM, 8.5 μM, 8 μM, 7.5 μM, 7 μM, 6.5 [μM, 6 μM, 5.5 μM, 5 μM, 4.5 μM, 4 μM, 3.5 μM, 3 μM, 2.5 μM, 2 μM, 1.5 μM, 1 μM, 750 nM, 500 nM, 250 nM, 100 nM, or 50 nM or less.

[0050] The present invention is related to molecules or compounds, preferably pheromones, odorants, or flavors, including possible toxic molecules identified by the screening methods of the invention and to their pharmaceutical, cosmetic and industrial (e.g., production of detergents, soap, shampoo, fragrances, odorant fingerprints, appetite suppressant compounds, etc.) use.

[0051] Such molecules or compounds may be used also for modifying taste and/or physiological reactions to odorant, pheromones or flavors in a mammal.

[0052] The present invention is also related to a (preferably nasal) spray for controlling appetite comprising the identified compounds or molecules by the method according to the invention in a suitable carrier.

[0053] Another application of such receptor is the trapping of odor by using the receptor, the cell or membrane according to the invention wherein the desired odor ligand is absorbed by the binding of the odorant ligand to the odorant receptor.

[0054] The present invention is further related to an odor trap, using said method for trapping odor.

[0055] Preferably, the tested odorants or pheromones upon the receptor according to the invention are advantageously selected from different body secretions such as sweat, salivary, urine, vaginal secretions, sperm, etc. The tested odorants or pheromones upon the receptor are also advantageously selected from the group of 16-androstene family, such as the 5α-androst-16-en-3α-ol, the 5α-androst-16-en-3-one, androstadienone, a human pheromone described previously (Grosser et al., Psychoneuroendocrinology vol. 25, pages 289-299, 2000) and other androstenol derivatives; the group consisting of estrene family, such as 1,3,5(10),16-estratetraen-3-ol and other estradiol derivatives described in PCT/US92/00219, PCT/US92/00220 and EP0562843; the group consisting of progestin family such as the human pheromone pregna-4,20-diene-3,6-dione (Monti-Bloch et al., J. Steroid Biochem. Mol. Biol. Vol. 65, pages 237-242) and other progesterone derivatives, the group consisting of small fatty acids such as acetic acid, propionic acid, butyric acid, isovaleric acid and isocaproïc acid that compose the putative human vaginal pheromone copulin and such as the trans-3-methyl-2-hexanoic acid found in human sweat, cyclic organic compounds homologs to known animal pheromone such as dehydro-exo-brevicomin and such as nepetalactone, and human homologs of the murin protein aphrodisin.

[0056] Other examples of such compounds are molecules present in vapour emanating from narcotics, like cocaine, marihuana, heroin, hashish, angel dust, gasoline, natural gas, alcohol, decayed human flesh, explosives, plastic explosives, fire arms, gun powder, toxic fumes, noxious fumes or dangerous fumes, etc.

[0057] Molecules or compounds which bind to and/or activate the receptors of the invention could be used also for promoting or suppressing chemical communication. Compounds which bind to and/or activate the receptor polypeptides of the invention are also useful as emitted stimuli able to modify the probability of response of a first organism or a part of a first organism when released by a second organism or an exogenous source.

[0058] The molecules or compounds of the invention could be used in the treatment or prevention of various disorders affecting, for instance, cell migration, cell death, cell growth, psychotic and neurological disorders, including anxiety, schizophrenia, maniac depression, depression or mound modification, etc.

[0059] As used herein, a “therapeutic amount” of a compound is an amount that, when contacted with a receptor of the present invention, increases or decreases ligand binding to said receptor or activation of said receptor by at least 10%, preferably 20%, 30%, 50% and up to 100%.

[0060] The receptors and/or ligands of the invention could be used also for improving contraceptive medication, treatment promoting axonal growth, neural connection and nerves regeneration, in modulating male and female endocrine functions, or may effect the menstrual cycle. Indeed, it is known that several of said receptors can be present at the surface of spermatozoids and can then find contraceptive application or could be used in the of sterility/fertility. these receptors are also present in various neurolfactory neurons and can improve their connection, especially upon the olfactory bulb or upon other tissue comprising said olfactory receptors.

[0061] Receptors and/or ligands of the invention could be also used for the treatment or the prevention of various animal or human behaviours, such as stimulation and/or suppression of appetite, stimulation and/or suppression of motivation and sexual attraction, stimulation and/or suppression of aggressivity, stimulation and/or suppression of alarm and defense behaviours, stimulation and/or suppression of territory and trail-marking, stimulation and/or suppression of social regulation and recognition, stimulation and/or suppression of mother-child recognition, etc.

[0062] The screening method according to the invention could be performed by well known methods to the person skilled in the art, preferably high-throughput screening, diagnostic and dosage devices based upon the method described in the International patent application WO00/02045 performed upon various solid supports such as micro-titer plates or biochips according to known techniques by the person skilled in the art.

[0063] Methods for screening for the binding of a candidate compound to a receptor molecule of the invention may be performed by several techniques which are known to those of skill in the art including, but not limited to surface plasmon resonance (Salamon et al., 1996, Biophys J. 71: 283-294; Salamon et al., 2001, Biophys. J. 80: 1557-1567; Salamon et al., 1999, Trends Biochem. Sci. 24: 213-219; Sarrio et al., 2000, Mol. Cell. Biol. 20: 5164-5174), or FRET.

[0064] Methods for screening for receptor signaling activity are also known to those of skill in the art and include, but are not limited to GTPase/GTP binding assays (Traynor and Nahorski, 1995, Mol. Pharmacol. 47: 848-854), aequorin assays which measure the response of mitochondrial apoaequorin to intracellular calcium release induced by the activation of GPCRs (Stables et al., 1997, Anal. Biochem. 252:115-126; Detheux et al., 2000, J. Exp. Med., 192 1501-1508), adenylate cyclase assays(Kenimer & Nirenberg, 1981, Mol. Pharmacol. 20: 585-591), cAMP assay (Horton & Baxendale, 1995, Methods Mol. Biol. 41: 91-105), assays for PLC breakdown and DAG/ inositol triphosphate (IP₃) production )(Phospholipid Signaling Protocols, edited by Ian M. Bird. Totowa, N.J., Humana Press, 1998; Rudolph et al., 1999, J. Biol. Chem. 274: 11824-11831), PKC activation assay (Kikkawa et al., 1982, J. Biol. Chem. 257: 13341), kinase assays, transcriptional reporter assays, or other functional assays include, for example, microphysiometer or biosensor assays (Hafner, 2000, Biosens. Bioelectron. 15: 149-158).

[0065] The present invention is also related to the molecules characterized and possibly recovered by said method, including the pharmaceutical composition comprising a sufficient amount of said molecules and a pharmaceutically acceptable carrier or diluent for the preparation of a medicament in the prevention and/or the treatment of specific diseases.

[0066] A last aspect of the present invention is related to a biosensor or any technical device comprising the receptors according to the invention for the detection of the specific above-mentioned compounds or molecules.

The application's sequence listing, which the Patent Office published only in electronic form, follows.

SEQUENCE LISTING (254 sequences)

SEQ ID NO: 1 - DNA, 1074 bp, Homo Sapiens
  CDS (1)..(1071)
atgttgaaattggttattattgagaacatggcagaaattatgctattctcattagatctcttgcttttctccacagatatcctttgctttaattttccttctaagatgatcaaacttcctggttttattaccatacaaatcttcttttatccacaagccagctttggaatttcagcaaacaccatccttcttctttaccacatcttcacctttgttttcagtcacaggtctaagtccattgacatgataattagtcacctgtctctcatccacatactgctgctcttcactcaggcaatattggtgtccttagacttctttggttcacagaatactcaggatgatcttaggtataaggtcattgtctttttaaacaaggtgatgaggggcctctccatctgcaccccctgcctcctgagtgtgctccaggccatcatcagccccagcatcttctccttggcaaagctcaaacatccttctgcaagtcacatcttaggattcttccttttctcatgggtcctcaacatgttcattggtgtaatcttctgctgtacactgcggctacccccagtgaaacggggccagtcttctgtttgtcatacagcactgttcctttttgcccatgagctacacccacaggagactgtttttcacactaatgactttgagggatgtcacctttatagggttcatggtcctctcaagaggctacatggtgattattttatacagacaataagaggctatctcagtgccttcacacagccagcctgtccccgagtctcaccagtgaaaagagcctcccaggctatcttactgctggtgagttttgtcttcacatactgggtggactttacgttctcattttcaggaggtgtgacatggataaatgattctctgctagtgtggctccaggttattgtggccaatagctatgccgcaattagtcctttgatgctaatttatgctgataaccaaatattcaagactctgcaaatgttatggtttaaatatttgtctcctccaaagctcatgttgaaatttaatcgccaatgtggcagtactaagaagtga

SEQ ID NO: 2 - protein, 357 aa, Homo Sapiens [sequence omitted]

SEQ ID NO: 3 - DNA, 906 bp, Homo sapiens
  CDS (1)..(903)
atggcctcccggtatgtggcagtgggaatgatcttatcacagaccgtggtgggagtcctggggagcttctctgttcttctccattatctctccttttactgcactgggtgcaggttaaggtccacagatttgattgttaagcacctgattgtagccaacttcttagctctccgctgtaaaggagtcccccagacaatggcagcttttggggttagatattttctcaatgctcttgggtgcaaacttgttttctatctccatagagtgggcaggggagtgtccattggcaccacctgcctcttgagtgtcttccaggtgatcacggtcagctccaggaaatccaggtgggcaaaacttaaagagaaagcccccaagcatgttggcttttctgttctcctgtgctggatcgtgtgcatgttggtaaacatcatctttcccatgtatgtgactggcaaatggaactacacaaacatcacagtgaacgaggatttgggatactgttctgggggaggcaacaacaaaatcgcacagacactgcgtgcaatgttgttatcattccctgatgtgttgtgtctggggctcatgctctgggtcagcagctccatggtttgcatactgcacaggcacaagcagcgggtccagcacattgataggagcaatctctcccccagagcctccccagagaacagagctacgcagagcatcctcatcctggtgagcacctttgtgtcttcttacactctctcctgccttttccaagtttgtatggctcttttggataatcccaatagtttactggtgaacacttcagccttaatgagtgtatgtttcccaactctcagcccctttgttctcatgagctgtgaccccagtgtatacaggttttgttttgcctggaaaagatga

SEQ ID NO: 4 - protein, 301 aa, Homo sapiens
MASRYVAVGMILSQTVVGVLGSFSVLLHYLSFYCTGCRLRSTDLIVKHLIVANFLALRCKGVPQTMAAFGVRYFLNALGCKLVFYLHRVGRGVSIGTTCLLSVFQVITVSSRKSRWAKLKEKAPKHVGFSVLLCWIVCMLVNIIFPMYVTGKWNYTNITVNEDLGYCSGGGNNKIAQTLRAMLLSFPDVLCLGLMLWVSSSMVCILHRHKQRVQHIDRSNLSPRASPENRATQSILILVSTFVSSYTLSCLFQVCMALLDNPNSLLVNTSALMSVCFPTLSPFVLMSCDPSVYRFCFAWKR

SEQ ID NO: 5 - DNA, 981 bp, Homo Sapiens
  CDS (1)..(978)
atgtgtcccttgaccttgcaggtcactggcctaatgaatgtctctgagccaaattccagctttgcttttgtaaatgaatttatactccaaggtttctcttgtgagtggacaattcagatcttcctcttctcactctttactacaacatatgcactgactataacagggaatggagccattgcttttgtcctgtggtgtgaccggcgacttcacactcccatgtacatgttcctgggaaatttctcctttttagagatatggtatgtctcttctacagttcccaagatgttggtcaacttcctttcagagaaaaaaaacatctcctttgctggatgttttctccagttttatttcttcttctctttgggtacatcagaatgcttgcttttgactgtgatggcctttgatcagtaccttgctatctgccgtcccttgctctatcctaatatcatgactgggcatctctatgccaaactggtcatactgtgctgggtttgtggatttctgtggttcctgatccccattgttctcatctctcagatgcccttctgtggcccaaacattattgaccatgttgtgtgtgacccagggccacgatttgcattggattgtgtttctgccccaagaatccaactgttttgctacactctaagctcattagttatttttggtaacttcctctttattattggatcctatactcttgtcctgaaagctatgttgggtatgccttcaagcactgggagacataaggccttctctacctgtgggtctcatttggctgtggtatcactgtgctatagctctcttatggtcatgtatgtgagcccaggactcggacattctacagggatgcagaaaattgaaactttgttctatgctatggtgaccccactcttcaatccccttatctatagcctccagaataaggagataaaggcagccctgaggaaagttctggggagttccaacataatctaa

SEQ ID NO: 6 - protein, 326 aa, Homo Sapiens
MCPLTLQVTGLMNVSEPNSSFAFVNEFILQGFSCEWTIQIFLFSLFTTTYALTITGNGAIAFVLWCDRRLHTPMYMFLGNFSFLEIWYVSSTVPKMLVNFLSEKKNISFAGCFLQFYFFFSLGTSECLLLTVMAFDQYLAICRPLLYPNIMTGHLYAKLVILCWVCGFLWFLIPIVLISQMPFCGPNIIDHVVCDPGPRFALDCVSAPRIQLFCYTLSSLVIFGNFLFIIGSYTLVLKAMLGMPSSTGRHKAFSTCGSHLAVVSLCYSSLMVMYVSPGLGHSTGMQKIETLFYAMVTPLFNPLIYSLQNKEIKAALRKVLGSSNII

SEQ ID NO: 7 - DNA, 945 bp, Homo Sapiens
  CDS (1)..(942)
atgggtgtaaaaaaccattccacagtgactgagtttcttctttcaggattaactgaacaagcagagcttcagctgcccctcttctgcctcttcttaggaatttacacagttactgtggtgggaaacctcagcatgatctcaattattaggctgaatcgtcaacttcatacccccatgtactatttcctgagtagtttgtcttttttagatttctgctattcttctgtcattacccctaaaatgctatcagggtttttatgcagagatagatccatctcctattctggatgcatgattcagctgttttttttctgtgtttgtgttatttctgaatgctacatgctggcagccatggcctgcgatcgctacgtggccatctgcagcccactgctctacagggtcatcatgtcccctagggtctgttctctgctggtggctgctgtcttctcagtaggtttcactgatgctgtgatccatggaggttgtatactcaggttgtctttctgtggatcaaacatcattaaacattatttctgtgacattgtccctcttattaaactctcctgctccagcacttatattgatgagcttttgatttttgtcattggtggatttaacatggtggccacaagcctaacaatcattatttcatatgcttttatcctcaccagcatcctgcgcatccactctaaaaagggcaggtgcaaagcgtttagcacctgtagctcccacctgacagctgttcttatgttttatgggtctctgatgtccatgtatctcaaacctgcttctagcagttcactcacccaggagaaagtatcctcagtattttataccactgtgattctcatgttgaatcccttgatatatagtctgaggaacaatgaagtaagaaatgctctgatgaaacttttaagaagaaaaatatctttatctccaggataa

SEQ ID NO: 8 - protein, 314 aa, Homo Sapiens
MGVKNHSTVTEFLLSGLTEQAELQLPLFCLFLGIYTVTVVGNLSMISIIRLNRQLHTPMYYFLSSLSFLDFCYSSVITPKMLSGFLCRDRSISYSGCMIQLFFFCVCVISECYMLAAMACDRYVAICSPLLYRVIMSPRVCSLLVAAVFSVGFTDAVIHGGCILRLSFCGSNIIKHYFCDIVPLIKLSCSSTYIDELLIFVIGGFNMVATSLTIIISYAFILTSILRIHSKKGRCKAFSTCSSHLTAVLMFYGSLMSMYLKPASSSSLTQEKVSSVFYTTVILMLNPLIYSLRNNEVRNALMKLLRRKISLSPG

SEQ ID NO: 9 - DNA, 957 bp, Homo Sapiens
  CDS (1)..(954)
atgaatccagcaaatcattcccaggtggcaggatttgttctactggggctctctcaggtttgggagcttcggtttgttttcttcactgttttctctgctgtgtattttatgactgtagtgggaaaccttcttattgtggtcatagtgacctccgacccacacctgcacacaaccatgtattttctcttgggcaatctttctttcctggacttttgctactcttccatcacagcacctaggatgctggttgacttgctctcaggcaaccctaccatttcctttggtggatgcctgactcaactcttcttcttccacttcattggaggcatcaagatcttcctgctgactgtcatggcgtatgaccgctacattgccatttcccagcccctgcactacacgctcattatgaatcagactgtctgtgcactccttatggcagcctcctgggtggggggcttcatccactccatagtacagattgcattgactatccagctgccattctgtgggcctgacaagctggacaacttttattgtgatgtgcctcagctgatcaaattggcctgcacagatacctttgtcttagagcttttaatggtgtctaacaatggcctggtgaccctgatgtgttttctggtgcttctgggatcgtacacagcactgctagtcatgctccgaagccactcacgggagggccgcagcaaggccctgtctacctgtgcctctcacattgctgtggtgaccttaatctttgtgccttgcatctacgtctatacaaggccttttcggacattccccatggacaaggccgtctctgtgctatacacaattgtcacccccatgctgaatcctgccatctataccctgagaaacaaggaagtgatcatggccatgaagaagctgtggaggaggaaaaaggaccctattggtcccctggagcacagacccttacattag

SEQ ID NO: 10 - protein, 318 aa, Homo Sapiens
MNPANHSQVAGFVLLGLSQVWELRFVFFTVFSAVYFMTVVGNLLIVVIVTSDPHLHTTMYFLLGNLSFLDFCYSSITAPRMLVDLLSGNPTISFGGCLTQLFFFHFIGGIKIFLLTVMAYDRYIAISQPLHYTLIMNQTVCALLMAASWVGGFIHSIVQIALTIQLPFCGPDKLDNFYCDVPQLIKLACTDTFVLELLMVSNNGLVTLMCFLVLLGSYTALLVMLRSHSREGRSKALSTCASHIAVVTLIFVPCIYVYTRPFRTFPMDKAVSVLYTIVTPMLNPAIYTLRNKEVIMAMKKLWRRKKDPIGPLEHRPLH

SEQ ID NO: 11 - DNA, 999 bp, Homo Sapiens
  CDS (1)..(996)
atgttagagggtgttgagcatctccttctgctacttcttttgacagatgtgaacagcaaggaactgcaaagtggaaaccagacttctgtgtctcacttcattttggtgggcctgcaccacccaccacagctgggagcgccactcttcttagctttccttgtcatctatctcctcactgtttctggaaatgggctcatcatcctcactgtcttagtggacatccggctccatcgtcccatgtgcttgttcctgtgtcacctctccttcttggacatgaccatttcttgtgctattgtccccaagatgctggctggctttctcttgggtagtaggattatctcctttgggggctgtgtaatccaactattttctttccatttcctgggctgtactgagtgcttcctttacacactcatggcttatgaccgtttccttgccatttgtaagcccttacactatgctaccatcatgacccacagagtctgtaactccctggctttaggcacctggctgggagggactatccattcacttttccaaacaagttttgtattccggctgcccttctgtggccccaatcgggtcgactacatcttctgtgacattcctgccatgctgcgtctagcctgcgccgatacggccatcaacgagctggtcacctttgcagacattggcttcctggccctcacctgcttcatgctcatcctcacttcctatggctatattgtagctgccatcctgcgaattccgtcagcagatgggcgccgcaatgccttctccacttgtgctgcccacctcactgttgtcattgtttactatgtgccctgcaccttcatttacctgcggccttgttcacaggagcccctggatggggtggtagctgtcttttacactgtcatcactcccttgcttaactccatcatctacacactgtgcaacaaagaaatgaaggcagcattacagaggctagggggccacaaggaagtgcagcctcactga

SEQ ID NO: 12 - protein, 332 aa, Homo Sapiens
MLEGVEHLLLLLLLTDVNSKELQSGNQTSVSHFILVGLHHPPQLGAPLFLAFLVIYLLTVSGNGLIILTVLVDIRLHRPMCLFLCHLSFLDMTISCAIVPKMLAGFLLGSRIISFGGCVIQLFSFHFLGCTECFLYTLMAYDRFLAICKPLHYATIMTHRVCNSLALGTWLGGTIHSLFQTSFVFRLPFCGPNRVDYIFCDIPAMLRLACADTAINELVTFADIGFLALTCFMLILTSYGYIVAAILRIPSADGRRNAFSTCAAHLTVVIVYYVPCTFIYLRPCSQEPLDGVVAVFYTVITPLLNSIIYTLCNKEMKAALQRLGGHKEVQPH

SEQ ID NO: 13 - DNA, 876 bp, Homo Sapiens
  CDS (1)..(873)
atggagagccccaatcgaaccaccattcaggagtttatcttctccgctttcccttattcctgggttaagtctgttgtctgctttgttccactgctcttcatctatgctttcattgttgttggaaacctggtcatcatcacagtggtccagttgaatactcacctccacactcccatgtatacttttatcagtgctctttctttcctggagatttggtataccacagccacaatcccaaagatgctgtctagcctgcttagtgagaggagcatttccttcaatggttgtctcctgcagatgtatttcttccattccaccggcatctgtgaggtgtgtctcttgacagttatggcctttgaccactacctggccatatgcagccctcttcattatccctctatcatgacccccaagctatgtacccaactgactttaagttgctgtgtttgtggctttatcacaccccttcctgagattgcctggatctctacactgccattttgtggttcgaatcaccttgaacatatcttctgtgacttcctcccagtgctgcgtctggcctgcacagacacacgagccatcgtcatgattcaggtagtggatgtcattcatgcagtggagattattacagctgtgatgctcatcttcatgtcctacgatggtattgtggctgtaattctacgtattcattcagctggaggccgccggcacagcattttccacgtgtgtctctcacttcattgtcttttcgctcttctttggcagtgtgactctcatgtacctacgcttctctgccacctactctttgttctgggatatagccattgctctggcctttgcagttttgtctcccttcttcaaccccattatctatag

SEQ ID NO: 14 - protein, 291 aa, Homo Sapiens
MESPNRTTIQEFIFSAFPYSWVKSVVCFVPLLFIYAFIVVGNLVIITVVQLNTHLHTPMYTFISALSFLEIWYTTATIPKMLSSLLSERSISFNGCLLQMYFFHSTGICEVCLLTVMAFDHYLAICSPLHYPSIMTPKLCTQLTLSCCVCGFITPLPEIAWISTLPFCGSNHLEHIFCDFLPVLRLACTDTRAIVMIQVVDVIHAVEIITAVMLIFMSYDGIVAVILRIHSAGGRRHSIFHVCLSLHCLFALLWQCDSHVPTLLCHLLFVLGYSHCSGLCSFVSLLQPHYL

SEQ ID NO: 15 - DNA, 939 bp, Homo Sapiens
  CDS (1)..(936)
atggacacagggaactggagccaggtagcagaattcatcatcttgggcttcccccatctccagggtgtccagatttatctcttcctcttgttgcttctcatttacctcatgactgtgttgggaaacctgctgatattcctggtggtctgcctggactcccggcttcacacacccatgtaccactttgtcagcattctctccttctcagagcttggctatacagctgccaccatccctaagatgctggcaaacttgctcagtgagaaaaagaccatttcattctctgggtgtctcctgcagatctatttctttcactcccttggagcgactgagtgctatctcctgacagctatggcctacgataggtatttagccatctgccggcccctccactacccaaccctcatgaccccaacactttgtgcagagattgccattggctgttggttgggaggcttggctgggccagtagttgaaatttccttgatttcacgcctcccattctgtggccccaatcgcattcagcacgtcttttgtgacttccctcctgtgctgagtttggcttgcactgatacgtctataaatgtcctagtagattttgttataaattcctgcaagatcctagccaccttcctgctgatcctctgctcctatgtgcagatcatctgcacagtgctcagaattccctcagctgccggcaagaggaaggccatctccacgtgtgcctcccacttcactgtggttctcatcttctatgggagcatcctttccatgtatgtgcagctgaagaagagctactcactggactatgaccaggccctggcagtggtctactcagtgctcacacccttcctcaaccccttcatctacagcttgcgcaacaaggagatcaaggaggctgtgaggaggcagctaaagagaattgggatattggcatga

SEQ ID NO: 16 - protein, 312 aa, Homo Sapiens
MDTGNWSQVAEFIILGFPHLQGVQIYLFLLLLLIYLMTVLGNLLIFLVVCLDSRLHTPMYHFVSILSFSELGYTAATIPKMLANLLSEKKTISFSGCLLQIYFFHSLGATECYLLTAMAYDRYLAICRPLHYPTLMTPTLCAEIAIGCWLGGLAGPVVEISLISRLPFCGPNRIQHVFCDFPPVLSLACTDTSINVLVDFVINSCKILATFLLILCSYVQIICTVLRIPSAAGKRKAISTCASHFTVVLIFYGSILSMYVQLKKSYSLDYDQALAVVYSVLTPFLNPFIYSLRNKEIKEAVRRQLKRIGILA

SEQ ID NO: 17 - DNA, 945 bp, Homo Sapiens
  CDS (1)..(942)
atgatggcatctgaaagaaatcaaagcagcacacccacttttattctcttgggtttttcagaatacccagaaatccaggttccactctttctggttttcttgttcgtctacacagtcactgtagtggggaacttgggcatgataataatcatcagactcaattcaaaactccatacaatcatgtactttttccttagtcacttgtccttgacagacttctgtttttccactgtagttacacctaaactgttggagaacttggttgtggaatacagaaccatctctttctctggttgcatcatgcaattttgttttgcttgcatttttggagtgacagaaactttcatgttagcagcgatggcttatgaccgttttgtggcagtttgtaaacccttgctgtataccactattatgtctcagaagctctgtgctcttctggtggctgggtcctatacatgggggatagtgtgctccctgatactcacatattttcttcttgacttatcgttttgtgaatctaccttcataaataattttatctgtgaccactctgtaattgtttctgcctcctactcagacccctatatcagccagaggctatgctttattattgccatattcaatgaggtgagcagcctaattatcattctgacatcatatatgcttattttcactaccattatgaagatgcgatctgcaagtgggcgccagaaaactttctccacctgtgcctcccacctgacagccatcactatcttccatggaactatccttttcctttactgtgttcctaatcctaaaacttctagcctcatagttacagtggcttctgtgttttacacagtggcgattccaatgctgaacccattgatctacagccttaggaacaaagatatcaataacatgtttgaaaaattagttgtcaccaaattgatttaccactga

SEQ ID NO: 18 - protein, 314 aa, Homo Sapiens [sequence omitted]

SEQ ID NO: 19 - DNA, 969 bp, Homo Sapiens
  CDS (1)..(966)
atggacaagttgtcatcaggtttggatatatacaggaatccactgaagaacaagactgaagtcaccatgtttatattgacaggcttcacagatgattttgagctgcaagtcttcctatttttactattttttgcaatctatctctttaccttgataggcaatttagggctggttgtgttggtcattgaggattcctggctccacaaccccatgtattattttcttagtgttttatcattcttggatgcttgctattctacagttgtcactccaaaaatgttggtcaatttcctggcaaaaaataaatccatttcatttatcggatgtgcaacacagatgcttctttttgttacttttggaactacagaatgttttctcttggctgcaatggcttatgatcactatgtagccatctacaaccctctcctgtattcagtgagcatgtcacccagagtctatgtgccactcatcactgcttcctacgttgctggcattttacatgctactatacatatagtggctacatttagcctgtccttctgtggatccaatgaaattaggcatgtcttttgtgatatgcctcctctccttgctatttcttgttctgacactcacacaaaccagcttctactcttctactttgtgggttctattgagatagtcactatcctgattgtcctcatttcctgtgatttcattctgttgtccattctgaagatgcattctgctaagggaaggcaaaaggccttctctacatgtggctctcacctaactggagtgacaatttatcatggaacaattctcgtcagttatatgagaccaagttccagctatgcttcagaccatgacatcatagtgtcaatattttacacaattgtgattcccaagttgaatcccatcatctatagtttgaggaacaaagaagtaaaaaaggcagtgaagaaaatgttgaaattggtttacaaatga

SEQ ID NO: 20 - protein, 322 aa, Homo Sapiens
MDKLSSGLDIYRNPLKNKTEVTMFILTGFTDDFELQVFLFLLFFAIYLFTLIGNLGLVVLVIEDSWLHNPMYYFLSVLSFLDACYSTVVTPKMLVNFLAKNKSISFIGCATQMLLFVTFGTTECFLLAAMAYDHYVAIYNPLLYSVSMSPRVYVPLITASYVAGILHATIHIVATFSLSFCGSNEIRHVFCDMPPLLAISCSDTHTNQLLLFYFVGSIEIVTILIVLISCDFILLSILKMHSAKGRQKAFSTCGSHLTGVTIYHGTILVSYMRPSSSYASDHDIIVSIFYTIVIPKLNPIIYSLRNKEVKKAVKKMLKLVYK

SEQ ID NO: 21 - DNA, 951 bp, Homo Sapiens
  CDS (1)..(948)
atggctcctgaaaatttcaccagggtcactgagtttattcttacaggtgtctctagctgtccagagctccagattcccctcttcctggtctttctggtgctctatgggctgaccatggcagggaacctgggcatcatcaccctcaccagtgttgactctcgacttcaaacccccatgtactttttcctgcaacatctggctctcattaatcttggtaactctactgtcattgcccctaaaatgctgattaactttttagtaaagaagaaaactacctcattctatgaatgtgccacccaactgggagggttcttgttctttattgtatcggaggtaatcatgctggctttgatggcctgtgaccgctatgtggctatttgtaaccctctgctgtacatggtggtggtgtctcggcggctctgcctcctgctggtctccctcacatacctctatggcttttctacagctattgtggtttcatcttatgtattctctgtgtcttattgctcttctaatataatcaatcatttttactgtgataatgttcctctgttagcattatcttgctctgatacttacttaccagaaacagttgtctttatatctgcagcaacaaatgtggttggttccttgattatagttctagtatcttatttcaatattgttttgtctattttaaaaatatgttcatcagaaggaaggaaaaaagccttttctacctgtgcttcacatatgatggcagtcacaattttttatgggacattgctattcatgtatgtgcagccccgaagtaaccattcattggatactgatgataagatggcttctgtgttttacacgttggtaattcctatgctgaatcccttgatctacagcctgaggaataaggatgtgaagactgctctacagagattcatgacaaatctgtgctattcctttaaaacaatgtaa

SEQ ID NO: 22 - protein, 316 aa, Homo Sapiens
MAPENFTRVTEFILTGVSSCPELQIPLFLVFLVLYGLTMAGNLGIITLTSVDSRLQTPMYFFLQHLALINLGNSTVIAPKMLINFLVKKKTTSFYECATQLGGFLFFIVSEVIMLALMACDRYVAICNPLLYMVVVSRRLCLLLVSLTYLYGFSTAIVVSSYVFSVSYCSSNIINHFYCDNVPLLALSCSDTYLPETVVFISAATNVVGSLIIVLVSYFNIVLSILKICSSEGRKKAFSTCASHMMAVTIFYGTLLFMYVQPRSNHSLDTDDKMASVFYTLVIPMLNPLIYSLRNKDVKTALQRFMTNLCYSFKTM

SEQ ID NO: 23 - DNA, 987 bp, Homo Sapiens
  CDS (1)..(984)
atgaagctgtggatggagagtcacctgatagtcccagaaacccgtcccagcccaaggatgatgagtaaccagacgttggtaaccgagttcatcctgcagggcttttcggagcacccagaataccgggtgttcttattcagctgtttcctcttcctctactctggggccctcacaggtaatgtcctcatcaccttggccatcacgttcaaccctgggctccacgctcctatgtactttttcttactcaacttggctactatggacattatctgcacctcttccatcatgcccaaggcgctggccagtctggtgtcggaagagagctccatctcctacgggggctgcatggcccagctctatttcctcacgtgggctgcatcctcagagctgctgctcctcacggtcatggcctatgaccggtacgcagccatctgccacccgctgcattacagcagcatgatgagcaaggtgttctgcagcgggctggccacagccgtgtggctgctctgcgccgtcaacacggccatccacacggggctgatgctgcgcttggatttctgtggccccaatgtcattatccatttcttctgcgaggtccctcccctgctgcttctctcctgcagctccacctacgtcaacggtgtcatgattgtcctggcggatgctttctacggcatagtgaacttcctgatgaccatcgcgtcctatggcttcatcgtctccagcatcctgaaggtgaagactgcctgggggaggcagaaagccttctccacctgctcttcccacctcaccgtggtgtgcatgtattacaccgctgtcttctacgcctacataagcccggtctctggctacagcgcagggaagagcaagttggctggcctgctgtacactgtgctgagtcctaccctcaaccccctcatctatactttgagaaacaaggaggtcaaagcagccctcaggaagcttttccctttcttcagaaattaa

SEQ ID NO: 24 - protein, 328 aa, Homo Sapiens
MKLWMESHLIVPETRPSPRMMSNQTLVTEFILQGFSEHPEYRVFLFSCFLFLYSGALTGNVLITLAITFNPGLHAPMYFFLLNLATMDIICTSSIMPKALASLVSEESSISYGGCMAQLYFLTWAASSELLLLTVMAYDRYAAICHPLHYSSMMSKVFCSGLATAVWLLCAVNTAIHTGLMLRLDFCGPNVIIHFFCEVPPLLLLSCSSTYVNGVMIVLADAFYGIVNFLMTIASYGFIVSSILKVKTAWGRQKAFSTCSSHLTVVCMYYTAVFYAYISPVSGYSAGKSKLAGLLYTVLSPTLNPLIYTLRNKEVKAALRKLFPFFRN

SEQ ID NO: 25 - DNA, 960 bp, Homo Sapiens
  CDS (1)..(957)
atgacacctggagaactagcccttgccagtggcaaccacaccccagtcaccaagttcatcttgcagggattctccaattatccagacctccaggagcttctcttcggagccatcctgctcatctatgccataacagtggtgggcaacttgggaatgatggcactcatcttcacagactcccatctccaaagcccaatgtatttcttcctcaatgtcctctcgtttcttgatatttgttactcttctgtggtcacacctaagctcttggtcaacttcctggtctctgacaagtccatctcttttgagggctgtgtggtccagctcgccttctttgtagtgcatgtgacagctgagagcttcctgctggcctccatggcctatgaccgcttcctagccatctgtcaacccctccattatggttctatcatgaccagggggacctgtctccagctggtagctgtgtcctatgcatttggtggagccaactccgctatccagactggaaatgtctttgccctgcctttctgtgggcccaaccagctaacacactactactgtgacataccaccccttctccacctggcttgtgccaacacagccacagcaagagtggtcctctatgtcttttctgctctggtcacccttctgcctgctgcagtcattctcacctcctactgcttggtcttggtggccattgggaggatgcgctcagtagcagggagggagaaggacctctccacttgtgcctcccactttctggccattgccattttctatggcaccgtggttttcacctatgttcagccccatggatctactaacaataccaatggccaagtagtgtccgtcttctacaccatcataattcccatgctcaatcccttcatctatagcctccgcaacaaggaggtgaagggcgctctgcagaggaagcttcaggtcaacatctttcccggctga

SEQ ID NO: 26 - protein, 319 aa, Homo Sapiens
MTPGELALASGNHTPVTKFILQGFSNYPDLQELLFGAILLIYAITVVGNLGMMALIFTDSHLQSPMYFFLNVLSFLDICYSSVVTPKLLVNFLVSDKSISFEGCVVQLAFFVVHVTAESFLLASMAYDRFLAICQPLHYGSIMTRGTCLQLVAVSYAFGGANSAIQTGNVFALPFCGPNQLTHYYCDIPPLLHLACANTATARVVLYVFSALVTLLPAAVILTSYCLVLVAIGRMRSVAGREKDLSTCASHFLAIAIFYGTVVFTYVQPHGSTNNTNGQVVSVFYTIIIPMLNPFIYSLRNKEVKGALQRKLQVNIFPG

SEQ ID NO: 27 - DNA, 939 bp, Homo Sapiens
  CDS (1)..(936)
atgagaaatggcacagtaatcacagaattcatcctgctaggctttcctgttatccaaggcctacaaacacctctctttattgcaatctttctcacctacatattaacccttgcaggcaatgggcttattattgccactgtgtgggctgagcccaggctacaaattccaatgtacttcttcctttgtaacttgtctttcttagaaatctggtacaccaccacagtcatccccaaactgctaggaacctttgtagtggcaagaacagtaatctgcatgtcctgctgcctgctgcaggccttcttccacttcttcgtgggcaccaccgagttcttgatcctcactatcatgtcttttgaccgctacctcaccatctgcaatccccttcaccaccccaccatcatgaccagcaaactctgcctgcagctggccctgagctcctgggtggtgggcttcaccattgtcttttgtcagacgatgctgctcatccagttgccattctgtggcaataatgttatcagtcatttctactgtgatgttgggcccagtttgaaagccgcctgcatagacaccagcattttggaactcctgggcgtcatagcaaccatccttgtgatcccagggtcacttctctttaatatgatttcttatatctacattctgtccgcaatcctacgaattccttcagccactggccaccaaaagactttctctacctgtgcctcgcacctgacagttgtctccctgctctacggggctgttctgttcatgtacctaagacccacagcacactcctcctttaagattaataaggtggtgtctgtgctaaatactatcctcaccccccttctgaatccctttatttatactattagaaacaaggaggtgaagggagccttaagaaaggcaatgacttgcccaaagactggtcatgcaaagtaa

SEQ ID NO: 28 - protein, 312 aa, Homo Sapiens
MRNGTVITEFILLGFPVIQGLQTPLFIAIFLTYILTLAGNGLIIATVWAEPRLQIPMYFFLCNLSFLEIWYTTTVIPKLLGTFVVARTVICMSCCLLQAFFHFFVGTTEFLILTIMSFDRYLTICNPLHHPTIMTSKLCLQLALSSWVVGFTIVFCQTMLLIQLPFCGNNVISHFYCDVGPSLKAACIDTSILELLGVIATILVIPGSLLFNMISYIYILSAILRIPSATGHQKTFSTCASHLTVVSLLYGAVLFMYLRPTAHSSFKINKVVSVLNTILTPLLNPFIYTIRNKEVKGALRKAMTCPKTGHAK

SEQ ID NO: 29 - DNA, 1038 bp, Homo Sapiens
  CDS (1)..(1035)
atgaatatcacactttattcatttctttatgtcctcagattaaatgaagggaatagtactggaagaaatatagatgaaagaaagaaaatgcaaggagaaaacttcaccatttggagcatttttttcttggagggattttcccagtacccagggttagaagtggttctcttcgtcttcagccttgtaatgtatctgacaacgctcttgggcaacagcactcttattttgatcactatcctagattcacgccttaaaacccccatgtacttattccttggaaatctctctttcatggatatttgttacacatctgcctctgttcctactttgctggtgaacttgctgtcatcccagaaaaccattatcttttctgggtgtgctgtacagatgtatctgtcccttgccatgggctccacagagtgtgtgctcctggccgtgatggcatatgaccgttatgtggccatttgtaacccgctgagatactccatcatcatgaacaggtgcgtctgtgcacggatggccacggtctcctgggtgacgggttgcctgaccgctctgctggaaaccagttttgccctgcagatacccctctgtgggaatctcatcgatcacttcacgtgtgaaattctggcggtgctaaagttagcttgcacaagttcactgctcatgaacaccatcatgctggtggtcagcattctcctcttgccaattccaatgctcttagtttgcatctcttacatcttcatcctttccactattctgagaatcacctcagcagagggaagaaacaaggctttttctacctgtggtgcccatttgactgtggtgattttgtattatggggctgccctctctatgtacctaaagccttcttcatcaaatgcacaaaaaatagacaaaatcatctcgttgctttacggagtgcttacccctatgttgaaccccataatttacagtttaagaaacaaggaagtcaaagatgctatgaagaaattgctgggcaaaataacattgcatcaaacacacgaacatctctga

SEQ ID NO: 30 - protein, 345 aa, Homo Sapiens
MNITLYSFLYVLRLNEGNSTGRNIDERKKMQGENFTIWSIFFLEGFSQYPGLEVVLFVFSLVMYLTTLLGNSTLILITILDSRLKTPMYLFLGNLSFMDICYTSASVPTLLVNLLSSQKTIIFSGCAVQMYLSLAMGSTECVLLAVMAYDRYVAICNPLRYSIIMNRCVCARMATVSWVTGCLTALLETSFALQIPLCGNLIDHFTCEILAVLKLACTSSLLMNTIMLVVSILLLPIPMLLVCISYIFILSTILRITSAEGRNKAFSTCGAHLTVVILYYGAALSMYLKPSSSNAQKIDKIISLLYGVLTPMLNPIIYSLRNKEVKDAMKKLLGKITLHQTHEHL

SEQ ID NO: 31 - DNA, 954 bp, Homo Sapiens
  CDS (1)..(951)
atgctaaggaatggcagcatagtgacggaatttatcctcgtgggctttcagcagagctccacttccacacgagcattgctctttgccctcttcttggccctctacagcctcaccatggccatgaatggcctcatcatctttatcacctcctggacagaccccaagctcaacagccccatgtacttcttcctcggccatctgtctctcctggatgtctgcttcatcaccactaccatcccacagatgttgatccacctcgtggtcagggaccacattgtctcctttgtatgttgcatgacccagatgtactttgtcttctgtgttggtgtggccgagtgcatcctcttggctttcatggcctatgaccgttatgttgctatctgctacccacttaactatgtcccgatcataagccagaaggtctgtgtcaggcttgtgggaactgcctggttctttgggctgatcaatggcatctttctcgagtatatttcattccgagagcccttccgcagagacaaccacatagaaagcttcttctgtgaggcccccatagtgattggcctctcttgtggggaccctcagtttagtctgtgggcaatctttgccgatgccatcgtggtaattctcagccccatggtgctcactgtcacttcctatgtgcacatcctggccaccatcctcagcaaagcctcctcctcaggtcgggggaagactttctctacttgtgcctctcacctgactgtggtcatctttctctacacttcagctatgttctcttacatgaacccccacagcacacatgggcctgacaaagacaaacctttctccctcctgtacaccatcattacccccatgtgcaaccccatcatttatagtttccgcaacaaggaaattaaggaggccatggtgagggcacttggaagaaccaggctggcccagccacagtctgtctag

SEQ ID NO: 32 - protein, 317 aa, Homo Sapiens
MLRNGSIVTEFILVGFQQSSTSTRALLFALFLALYSLTMAMNGLIIFITSWTDPKLNSPMYFFLGHLSLLDVCFITTTIPQMLIHLVVRDHIVSFVCCMTQMYFVFCVGVAECILLAFMAYDRYVAICYPLNYVPIISQKVCVRLVGTAWFFGLINGIFLEYISFREPFRRDNHIESFFCEAPIVIGLSCGDPQFSLWAIFADAIVVILSPMVLTVTSYVHILATILSKASSSGRGKTFSTCASHLTVVIFLYTSAMFSYMNPHSTHGPDKDKPFSLLYTIITPMCNPIIYSFRNKEIKEAMVRALGRTRLAQPQSV

SEQ ID NO: 33 - DNA, 960 bp, Homo Sapiens
  CDS (1)..(957)
atgttctatctacactggaccatggaaaaaagcaataatagcactttgtttattctcttggggttttcccaaaataagaacattgaagtcctctgctttgtattatttttgttttgctacattgctatttggatgggaaacttactcataatgatttctatcacgtgcacccagctcattcaccaacccatgtatttcttcctcaattacctctcactctccgacctttgctacacatccacagtgacccccaaattaatggttgacttactggcagaaagaaagaccatttcctataataactgtatgatacaactctttaccacccatttttttggaggcatagagatcttcattctcacagggatggcctatgaccgctatgtggccatttgcaagcccctgcactacaccattattatgagcaggcaaaagtgtaacacaatcatcatagtttgttgtactgggggatttatacattctgccagtcagtttcttctcaccatctttgtaccattttgtggcccaaatgagatagatcactacttctgtgatgtgtatcctttgctgaaattggcctgttctaatatacacatgataggtctcttagtcattgctaattcaggcttaattgctttggtgacatttgttgtcttgttgttgtcttatgtttttatattgtataccatcagagcatactctgcagagagacgcagcaaagctcttgccacttgtagttctcatgtaattgttgtggtcctgttttttgctcctgcattgttcatttacattagaccggtcacaacattctcagaagataaagtgtttgcccttttttataccatcattgctcccatgttcaaccctctcatatacacgctgagaaacacagagatgaagaacgccatgaggaaagtgtggtgttgtcaaatactcctgaaaagaaatcaacttttctga

SEQ ID NO: 34 - protein, 319 aa, Homo Sapiens
MFYLHWTMEKSNNSTLFILLGFSQNKNIEVLCFVLFLFCYIAIWMGNLLIMISITCTQLIHQPMYFFLNYLSLSDLCYTSTVTPKLMVDLLAERKTISYNNCMIQLFTTHFFGGIEIFILTGMAYDRYVAICKPLHYTIIMSRQKCNTIIIVCCTGGFIHSASQFLLTIFVPFCGPNEIDHYFCDVYPLLKLACSNIHMIGLLVIANSGLIALVTFVVLLLSYVFILYTIRAYSAERRSKALATCSSHVIVVVLFFAPALFIYIRPVTTFSEDKVFALFYTIIAPMFNPLIYTLRNTEMKNAMRKVWCCQILLKRNQLF

SEQ ID NO: 35 - DNA, 990 bp, Homo Sapiens
  CDS (1)..(987)
atgatccctgttggagctttcatcttttccttgggaaacatgcaaaaccaaagctttgtaactgagtttgtcctcctgggactttcacagaatccaaatgttcaggaaatagtatttgttgtatttttgtttgtctacattgcaactgttgggggcaacatgctaattgtagtaaccattctcagcagccctgctcttctggtgtctcctatgtacttcttcttgggcttcctgtccttcctggatgcgtgcttctcatctgtcatcaccccaaagatgattgtagactccctctatgtgacaaaaaccatctcttttgaaggctgcatgatgcagctctttgctgaacacttctttgctggggtggaggtgattgtcctcacagccatggcctatgatcgttatgtggccatttgcaagcccttgcattactcttctatcatgaacaggaggctctgtggcattctgatgggggtagcctggacagggggcctcttgcattccatgatacaaattctttttactttccagcttcccttttgtggccccaatgtcatcaatcactttatgtgtgacttgtacccgttactggagcttgcctgcactgatactcacatctttggcctcatggtggtcatcaacagtgggtttatctgcatcataaacttctccttgttgcttgtctcctatgctgtcatcttgctctctctgagaacacacagttctgaagggcgctggaaagctctctccacctgtggatctcacattgctgttgtgattttgttctttgtcccatgcatatttgtatatacacgacctccatctgctttttcccttgacaaaatggcggcaatattttatatcatcttaaatcccttgctcaatcctttgatttacactttcaggaataaggaagtaaaacaggccatgaggagaatatggaacagactgatggtggtttctgatgagaaagaaaatattaaactttaa

SEQ ID NO: 36 - protein, 329 aa, Homo Sapiens
MIPVGAFIFSLGNMQNQSFVTEFVLLGLSQNPNVQEIVFVVFLFVYIATVGGNMLIVVTILSSPALLVSPMYFFLGFLSFLDACFSSVITPKMIVDSLYVTKTISFEGCMMQLFAEHFFAGVEVIVLTAMAYDRYVAICKPLHYSSIMNRRLCGILMGVAWTGGLLHSMIQILFTFQLPFCGPNVINHFMCDLYPLLELACTDTHIFGLMVVINSGFICIINFSLLLVSYAVILLSLRTHSSEGRWKALSTCGSHIAVVILFFVPCIFVYTRPPSAFSLDKMAAIFYIILNPLLNPLIYTFRNKEVKQAMRRIWNRLMVVSDEKENIKL

SEQ ID NO: 37 - DNA, 963 bp, Homo Sapiens
  CDS (1)..(960)
atgagttcctgcaacttcacacatgccacctgtgtgcttattggtatcccaggattagagaaagcccatttctgggttggcttccccctcctttccatgtatgtagtggcaatgtgtggaaactgcatcgtggtcttcatcgtaaggacggaacgcagcctgcacgctccgatgtacctctttctctgcatgcttgcagccattgacctggccttatccacatccaccatgcctaagatccttgcccttttctggtttgattcccgagagattagcattgaggcctgtcttacccagatgttctttattcatgccctctcagccattgaatccaccatcctgctggccatggcctttgaccgttatgtggccatctgccacccactgcgccatgctgcagtgctcaacaatacagtaacagcccagattggcatcgtggctgtggtccgcggatccctcttttttttcccactgcctctgctgatcaagcggctggccttctgccactccaatgtcctctcgcactcctattgtgtccaccaggatgtaatgaagttggcctatgcagacactttgcccaatgtggtatatggtcttactgccattctgctggtcatgggcgtggacgtaatgttcatctccttgtcctattttctgataatacgaacggttctgcaactgccttccaagtcagagcgggccaaggcctttggaacctgtgtgtcacacattggtgtggtactcgccttctatgtgccacttattggcctctcagttgtacaccgctttggaaacagccttcatcccattgtgcgtgttgtcatgggtgacatctacctgctgctgcctcctgtcatcaatcccatcatctatggtgccaaaaccaaacagatcagaacacgggtgctggctatgttcaagatcagctgtgacaaggacttgcaggctgtgggaggcaagtga

SEQ ID NO: 38 - protein, 320 aa, Homo Sapiens
MSSCNFTHATCVLIGIPGLEKAHFWVGFPLLSMYVVAMCGNCIVVFIVRTERSLHAPMYLFLCMLAAIDLALSTSTMPKILALFWFDSREISIEACLTQMFFIHALSAIESTILLAMAFDRYVAICHPLRHAAVLNNTVTAQIGIVAVVRGSLFFFPLPLLIKRLAFCHSNVLSHSYCVHQDVMKLAYADTLPNVVYGLTAILLVMGVDVMFISLSYFLIIRTVLQLPSKSERAKAFGTCVSHIGVVLAFYVPLIGLSVVHRFGNSLHPIVRVVMGDIYLLLPPVINPIIYGAKTKQIRTRVLAMFKISCDKDLQAVGGK

SEQ ID NO: 39 - DNA, 924 bp, Homo Sapiens
  CDS (1)..(921)
atgctcaatttcaccgatgtgacagagttcattcttttggggctaacgagccgtcgagaatggcaagttctcttcttcatcatctttcttgtggtctacatcatcaccatggtgggcaatatcggcatgatggtgttaatcaaggtcagtcctcagcttaacaaccccatgtactttttcctcagtcacttgtcatttgttgatgtgtggttttcttccaatgtcacccctaaaatgttggaaaacctgttttcagataaaaaaacaattacttatgctggttgtttagtacagtgtttcttcttcattgctcttgtccatgtggaaatttttattcttgctgcgatggcctttgatagatacatggcaattgggaatcctctgctttatggcagtaaaatgtcaagggttgtctgtattcgactgattactttcccttacatttatggttttctgacgagtctggcagcaacattatggacttacggcttgtacttctgtggaaaaattgagatcaaccatttctactgtgcagatccacctctcatcaaaatggcctgtgccgggacctttgtaaaagaatatacaatgatcatacttgccggcattaacttcacatattccctgactgtaattatcatctcttacttattcatcctcattgccattctgcgaatgcgctcagcagaaggaaggcagaaggccttttccacatgtgggtcccatctgacagctgtcattatattctatggtactctgatcttcatgtatctcagacgtcccacagaggagtctgtggagcaggggaagatggtggctgtgttctataccacagtgatccccatgttgaatcccatgatctacagtctgaggaacaaggatgtgaaaaaggccatgatgaaagtgatcagcagatcatgttaa

SEQ ID NO: 40 - protein, 307 aa, Homo Sapiens
MLNFTDVTEFILLGLTSRREWQVLFFIIFLVVYIITMVGNIGMMVLIKVSPQLNNPMYFFLSHLSFVDVWFSSNVTPKMLENLFSDKKTITYAGCLVQCFFFIALVHVEIFILAAMAFDRYMAIGNPLLYGSKMSRVVCIRLITFPYIYGFLTSLAATLWTYGLYFCGKIEINHFYCADPPLIKMACAGTFVKEYTMIILAGINFTYSLTVIIISYLFILIAILRMRSAEGRQKAFSTCGSHLTAVIIFYGTLIFMYLRRPTEESVEQGKMVAVFYTTVIPMLNPMIYSLRNKDVKKAMMKVISRSC

SEQ ID NO: 41 - DNA, 918 bp, Homo Sapiens
  CDS (1)..(915)
atgtccaacacaaatggcagtgcaatcacagaattcattttacttgggctcacagattgcccggaactccagtctctgctttttgtgctgtttctggttgtttacctcgtcaccctgctaggcaacctgggcatgataatgttaatgagactggactctcgccttcacacgcccatgtacttcttcctcactaacttagcctttgtggatttgtgctatacatcaaatgcaaccccgcagatgtcgactaatatcgtatctgagaagaccatttcctttgctggttgctttacacagtgctacattttcattgcccttctactcactgagttttacatgctggcagcaatggcctatgaccgctatgtggccatatatgaccctctgcgctacagtgtgaaaacgtccaggagagtttgcatctgcttggccacatttccctatgtctatggcttctcagatggactcttccaggccatcctgaccttccgcctgaccttctgtagatccaatgtcatcaaccacttctactgtgctgacccgccgctcattaagctttcttgttctgatacttatgtcaaagagcatgccatgttcatatctgctggcttcaacctctccagctccctcaccatcgtcttggtgtcctatgccttcattcttgctgccatcctccggatcaaatcagcagagggaaggcacaaggcattctccacctgtggttcccatatgatggctgtcaccctgttttatgggactctcttttgcatgtatataagaccaccaacagataagactgttgaggaatctaaaataatagctgtcttttacacctttgtgagtccggtacttaatccattgatctacagtctgaggaataaagatgtgaagcaggccttgaagaatgtcctgagatga

SEQ ID NO: 42 - protein, 305 aa, Homo Sapiens [sequence omitted]

SEQ ID NO: 43 - DNA, 951 bp, Homo Sapiens
  CDS (1)..(948)
atgggaaaaccaggcagagtgaaccaaaccactgtttcagacttcctccttctaggactctctgagtggccagaggagcagcctcttctgtttggcatcttccttggcatgtacctggtcaccatggtggggaacctgctcattatcctggccatcagctctgacccacacctccatactcccatgtacttctttctggccaacctgtcattaactgatgcctgtttcacttctgcctccatccccaaaatgctggccaacattcatacccagagtcagatcatctcgtattctgggtgtcttgcacagctatatttcctccttatgtttggtggccttgacaactgcctgctggctgtgatggcatatgaccgctatgtggccatctgccaaccactccattacagcacatctatgagtccccagctctgtgcactaatgctgggtgtgtgctgggtgctaaccaactgtcctgccctgatgcacacactgttgctgacccgcgtggctttctgtgcccagaaagccatccctcatttctattgtgatcctagtgctctcctgaagcttgcctgctcagatacccatgtaaacgagctgatgatcatcaccatgggcttgctgttcctcactgttcccctcctgctgatcgtcttctcctatgtccgcattttctgggctgtgtttgtcatctcatctcctggagggagatggaaggccttctctacctgtggttctcatctcacggtggttctgctcttctatgggtctcttatgggtgtgtatttacttcctccatcaacttactctacagagagggaaagtagggctgctgttctctatatggtgattattcccacgctaaacccattcatttatagcttgaggaacagagacatgaaggaggctttgggtaaactttttgtcagtggaaaaacattctttttatga

SEQ ID NO: 44 - protein, 316 aa, Homo Sapiens
MGKPGRVNQTTVSDFLLLGLSEWPEEQPLLFGIFLGMYLVTMVGNLLIILAISSDPHLHTPMYFFLANLSLTDACFTSASIPKMLANIHTQSQIISYSGCLAQLYFLLMFGGLDNCLLAVMAYDRYVAICQPLHYSTSMSPQLCALMLGVCWVLTNCPALMHTLLLTRVAFCAQKAIPHFYCDPSALLKLACSDTHVNELMIITMGLLFLTVPLLLIVFSYVRIFWAVFVISSPGGRWKAFSTCGSHLTVVLLFYGSLMGVYLLPPSTYSTERESRAAVLYMVIIPTLNPFIYSLRNRDMKEALGKLFVSGKTFFL

SEQ ID NO: 45 - DNA, 975 bp, Homo Sapiens
  CDS (1)..(972)
atgggaatgtccaacctgacaagactctctgaatttattctcttgggactctcctctcggtctgaagaccagaggccactctttgccctctttcttatcatatacctggtcactttgatgggaaatctgctcatcatcttggctatccactctgatcctcgacttcaaaaccctatgtattttttcctaagcatcttgtcctttgctgatatttgctacacaacagtcatagtcccaaagatgctcgtgaacttcttatcagagaaaaagaccatttcctatgctgaatgtctggcacagatgtatttcttcctggtttttggaaacatagatagttatctcctggcggctatggccatcaaccgctgtgtagccatttgtaacccattccattatgtcactgttatgaaccgcagatgctgtgtgttgctactagcattccccatcactttctcctatttccactctctcctacatgtcctcctggtgaatcggctcaccttttgtacatcaaatgttatccatcattttttttgtgatgtcaaccctgtgctgaaactgtcctgctcctccacctttgtcaatgaaattgtggccatgacagaagggctggcctctgtgatggctccatttgtctgtatcatcatctcttatctaagaattctcatcgctgttctcaagattccctcagcagctggaaaacacaaagccttctccacctgcagctcccatctcactgtggtgattctgttttatgggagtattagctatgtctatttgcagcctttgtccagctatactgtcaaggaccgaatagcaacaatcaactacactgtgttgacatcagtgttgaacccatttatctacagtttaagaaacaaagacatgaaacggggcttacagaaattgataaacaagattaagtctcaaatgagtaggttctctacaaagaccaataaaatctgtggaccctga

SEQ ID NO: 46 - protein, 324 aa, Homo Sapiens
MGMSNLTRLSEFILLGLSSRSEDQRPLFALFLIIYLVTLMGNLLIILAIHSDPRLQNPMYFFLSILSFADICYTTVIVPKMLVNFLSEKKTISYAECLAQMYFFLVFGNIDSYLLAAMAINRCVAICNPFHYVTVMNRRCCVLLLAFPITFSYFHSLLHVLLVNRLTFCTSNVIHHFFCDVNPVLKLSCSSTFVNEIVAMTEGLASVMAPFVCIIISYLRILIAVLKIPSAAGKHKAFSTCSSHLTVVILFYGSISYVYLQPLSSYTVKDRIATINYTVLTSVLNPFIYSLRNKDMKRGLQKLINKIKSQMSRFSTKTNKICGP

SEQ ID NO: 47 - DNA, 951 bp, Homo Sapiens
  CDS (1)..(948)
atgccttaaatgacaatggctgctgagaattcctccttcgtgacacagtttatcctcgcaggcttaactgaccaaccgggagtccagatccccctcttcttcctgtttctaggcttctacgtggtcactgtggtggggaacctgggcttgataaccctgataaggctcaactctcacttgcacacccctatgtacttcttcctctataacttgtccttcatagatttctgctattccagtgttatcactcccaaaatgctgatgagctttgtcttaaagaagaacagcatctcctacgcagggtgtatgactcagctcttcttctttcttttctttgttgtctctgagtccttcatcctgtcagcaatggcgtatgaccgctatgtggccatctgtaacccactgttgtacatggtcaccatgtctccccaggtgtgttttctccttttgttgggtgtctatgggatggggtttgctggggccatggcccacacagcgtgcatgatgggtgtgaccttctgtgccaataaccttgtcaaccactacatgtgtgacatccttccccttcttgagtgtgcttgcaccagcacctatgtgaatgagcttgtagtgtttgttgttgtgggcattgatattggtgtgcccacagtcaccatcttcatttcctatgctctcattctctccagcatcttccacattgattccacggagggcaggtccaaagccttcagcacctgcagctcccacataattgcagtttctctgttctttgggtcaggagcattcatgtacctcaaacccttttctcttttagctatgaaccagggcaaggtgtcttccctattctataccactgtggtgcccatgctcaacccattaatttatagcctgaggaataaggacgtcaaagttgctctaaagaaaatcttgaacaaaaatgcattctcctga

SEQ ID NO: 48 - protein, 313 aa, Homo Sapiens
MTMAAENSSFVTQFILAGLTDQPGVQIPLFFLFLGFYVVTVVGNLGLITLIRLNSHLHTPMYFFLYNLSFIDFCYSSVITPKMLMSFVLKKNSISYAGCMTQLFFFLFFVVSESFILSAMAYDRYVAICNPLLYMVTMSPQVCFLLLLGVYGMGFAGAMAHTACMMGVTFCANNLVNHYMCDILPLLECACTSTYVNELVVFVVVGIDIGVPTVTIFISYALILSSIFHIDSTEGRSKAFSTCSSHIIAVSLFFGSGAFMYLKPFSLLAMNQGKVSSLFYTTVVPMLNPLIYSLRNKDVKVALKKILNKNAFS

SEQ ID NO: 49 - DNA, 945 bp, Homo Sapiens
  CDS (1)..(942)
atggaaaaaagaaatctaacagttgtcagggaattcgtccttctgggacttcctagctcagcagagcagcagcacctcctgtctgtgctctttctctgtatgtatttagccaccaccttggggaacatgctcatcattgcgacgattggctttgactctcacctccattcccctatgtacttcttccttagtaacttggcctttgttgacatctgctttacgtcgactacagtcccccaaatggtagtgaatatcttgactggcaccaagactatctcttttgcaggctgcctcacccagctcttcttcttcgtttcttttgtgaatatggacagcctccttctgtgtgtgatggcgtatgatagatatgtggcgatttgccaccccttacattacaccgccagaatgaacctgtgcctttgtgtccagctagtggctggactgtggcttgttacttacctccacgccctcctgcatactgtcctaatagcacagctgtccttctgtgcctccaatatcatccatcatttcttctgtgatctcaatcctctcctgcagctctcttgctctgacgtctccttcaatgtaatgatcatttttgcagtaggaggtctattggctctcacgccccttgtctgtatcctcgtatcttatggacttatcttctccactgttctgaagatcacctctactcagggcaagcagagagctgtttccacctgcagctgccacctgtcagtggtggtgttgttttacggcacagccatcgccgtctatttcagcccttcatccccccatatgcctgagagcgacactctgtcaaccatcatgtattcaatggtggctccgatgctgaatcctttcatctataccctaaggaacagggatatgaagaggggacttcagaaaatgcttctcaagtgcacagtctttcagcagcaataa

SEQ ID NO: 50 - protein, 314 aa, Homo Sapiens
MEKRNLTVVREFVLLGLPSSAEQQHLLSVLFLCMYLATTLGNMLIIATIGFDSHLHSPMYFFLSNLAFVDICFTSTTVPQMVVNILTGTKTISFAGCLTQLFFFVSFVNMDSLLLCVMAYDRYVAICHPLHYTARMNLCLCVQLVAGLWLVTYLHALLHTVLIAQLSFCASNIIHHFFCDLNPLLQLSCSDVSFNVMIIFAVGGLLALTPLVCILVSYGLIFSTVLKITSTQGKQRAVSTCSCHLSVVVLFYGTAIAVYFSPSSPHMPESDTLSTIMYSMVAPMLNPFIYTLRNRDMKRGLQKMLLKCTVFQQQ

SEQ ID NO: 51 - DNA, 966 bp, Homo Sapiens
  CDS (1)..(963)
atgcccatacttatggctataggaaactggacagaaataagtgaatttatcctcatgagcttctcttccctacctactgaaatacagtcattgctcttcctgacatttctaactatctatttggttactctgaagggaaacagcctcatcattctggttaccctagctgaccccatgctacacagccccatgtacttcttcctcagaaacttatctttcctggagattggcttcaacctagtcattgtgcccaaaatgctggggaccctgcttgcccaggacacaaccatctccttccttggctgtgccactcagatgtatttcttcttcttctttggggtagctgaatgcttcctcctggctaccatggcatatgaccgctatgtggccatctgcagtcccttgcactacccagtcatcatgaaccaaaggacacgggccaaactggctgctgcttcctggttcccaggctttcctgtagctactgtgcagaccacatggctcttcagttttccattctgtggcaccaacaaggtgaaccacttcttctgtgacagcccgcctgtgctgaagctggtctgtgcagacacagcactgtttgagatctacgccatcgtcggaaccattctggtggtcatgatcccctgcttgctgatcttgtgttcctatactcgcattgctgctgctatcctcaagatcccatcagctaaagggaagcataaagccttctctacgtgctcctcacacctccttgttgtctctcttttctatatatcttctagcctcacctacttctggcctaaatcaaataattctcctgagagcaagaagttgttatcattatcctacactgttgtgactcccatgttgaaccccattatctacagcttgagaaatagcgaggtgaagaatgccctcagcaggaccttccacaaggtcctagccctcagaaactgtatcccatag

SEQ ID NO: 52 - protein, 321 aa, Homo Sapiens
MPILMAIGNWTEISEFILMSFSSLPTEIQSLLFLTFLTIYLVTLKGNSLIILVTLADPMLHSPMYFFLRNLSFLEIGFNLVIVPKMLGTLLAQDTTISFLGCATQMYFFFFFGVAECFLLATMAYDRYVAICSPLHYPVIMNQRTRAKLAAASWFPGFPVATVQTTWLFSFPFCGTNKVNHFFCDSPPVLKLVCADTALFEIYAIVGTILVVMIPCLLILCSYTRIAAAILKIPSAKGKHKAFSTCSSHLLVVSLFYISSSLTYFWPKSNNSPESKKLLSLSYTVVTPMLNPIIYSLRNSEVKNALSRTFHKVLALRNCIP

SEQ ID NO: 53 - DNA, 933 bp, Homo Sapiens
  CDS (1)..(930)
caaactatgagacagataaatcagacacaagtgacagaattcctccttctgggactctctgatgggccacacaccgagcagctgctatttatcgtattattgggtgtctacctggtcactgtgcttggaaatctgcttctaatctcccttgttcatgttgactcccaacttcacacacccatgtatttttttctctgcaacttgtctctggctgacctctgtttctctaccaacatagttcctcaggcactagtccacctgctttccagaaagaaggtcattgcattcacactttgcgcagctcgacttctctttttcctcatttttgggtgtacccagtgcgcccttcttgcagtgatgtcctatgatcgctatgttgcaatctgcaatcctctgcgttaccctaacatcatgacctggaaagtgtgtgtccagctggcaacaggatcatggaccagtggcattctggtgtctgtggtagacaccaccttcatactgaggctaccctaccgaggcagtaacagcattgctcatttcttttgtgaggcccctgcactattgatcttagcatccacagacacccatgcatcagagatggccatttttcttatgggggttgtgattctcctcatacctgtttttctgattctggtatcctatggccgtatcatagtaactgtggtcaagatgaagtcaactgtggggagtctcaaggcattttctacctgtggctcccacctcatggtggtcatacttttttatggatcagcaattatcacttacatgacacccaagtcttccaaacagcaggaaaaatcggtgtctgttttctatgcaatagtgactcccatgcttaatcccctcatctatagcctgagaaacaaggatgtgaaggcagctctgaggaaagtagccacaaggaatttcccatga

SEQ ID NO: 54 - protein, 310 aa, Homo Sapiens
QTMRQINQTQVTEFLLLGLSDGPHTEQLLFIVLLGVYLVTVLGNLLLISLVHVDSQLHTPMYFFLCNLSLADLCFSTNIVPQALVHLLSRKKVIAFTLCAARLLFFLIFGCTQCALLAVMSYDRYVAICNPLRYPNIMTWKVCVQLATGSWTSGILVSVVDTTFILRLPYRGSNSIAHFFCEAPALLILASTDTHASEMAIFLMGVVILLIPVFLILVSYGRIIVTVVKMKSTVGSLKAFSTCGSHLMVVILFYGSAIITYMTPKSSKQQEKSVSVFYAIVTPMLNPLIYSLRNKDVKAALRKVATRNFP

SEQ ID NO: 55 - DNA, 897 bp, Homo Sapiens
  CDS (1)..(894)
atgagaaatcacacaatggtgactgaattcatccttctgggaatccctgagacagagggcctagagacagcccttttattcctgttctcctcattttatttatgcaccctcttgggaaacgtgcttatccttacagctatcatctcctccactcgacttcacactcctatgtattttttcttgggaaacctctccatctttgacctgggtttctcttcaacgactgttcccaagatgttgttctacctttcggggaacagccatgctatctcgtatgcaggctgcgtgtcccagcttttcttctaccatttcctaggctgtactgagtgtttcctctacacagtgatggcctgtgaccgctttgttgccatatgttttcctttgagatacacggtcatcatgaaccacagggtgtgctttatgttggccacggggacctggatgattggctgtgtccatgccatgatcctaactcccctcaccttccagttaccttactgtggccctaacaaggtgggctattacttctgtgatattcctgcagtgttacctctagcctgtaaggacacatccttagcccagagggtaggttttacaaatgttggtcttttgtctctcatttgcttttttctcatccttgtttcctatacttgcattgggatttccatatcaaaaatccgctcagcagagggcaggcagcgggccttctccacctgcagcgctcacctcactgcaatcctttgtgcttatgggccagtcatcgttatctatctacaacccaatcccagtgccttgcttggttccataattcagatattgaataatctggtaaccccaatgttgaatccactaatctatagccttaggaataaggatgtaaaatcagatcagccctga

SEQ ID NO: 56 - protein, 298 aa, Homo Sapiens
MRNHTMVTEFILLGIPETEGLETALLFLFSSFYLCTLLGNVLILTAIISSTRLHTPMYFFLGNLSIFDLGFSSTTVPKMLFYLSGNSHAISYAGCVSQLFFYHFLGCTECFLYTVMACDRFVAICFPLRYTVIMNHRVCFMLATGTWMIGCVHAMILTPLTFQLPYCGPNKVGYYFCDIPAVLPLACKDTSLAQRVGFTNVGLLSLICFFLILVSYTCIGISISKIRSAEGRQRAFSTCSAHLTAILCAYGPVIVIYLQPNPSALLGSIIQILNNLVTPMLNPLIYSLRNKDVKSDQP

SEQ ID NO: 57 - DNA, 969 bp, Homo Sapiens
  CDS (1)..(966)
atgaattccctgaaggacgggaatcacaccgctctgacggggttcatcctattgggcttaacagatgatccaatccttcgagtcatcctcttcatgatcatcctatctggtaatctcagcataattattcttatcagaatttcttctcagctccatcatcctatgtatttctttctgagccacttggcttttgctgacatggcctattcatcttctgtcacacccaacatgcttgtaaacttcctggtggagagaaatacagtctcctaccttggatgtgccatccagcttggttcagcggctttctttgcaacagtcgaatgcgtccttctggctgccatggcctatgaccgctttgtggcaatttgcagtccactgctttattcaaccaaaatgtccacacaagtcagtgtccagctactcttagtagtttacatagctggttttctcattgctgtctcctatactacttccttctattttttactcttctgtggaccaaatcaagtcaatcattttttctgtgatttcgctcccttacttgaactctcctgttctgatatcagtgtctccacagttgttctctcattttcttctggatccatcattgtggtcactgtgtgtgtcatagccgtctgctacatctatatcctcatcaccatcctgaagatgcgctccactgaggggcaccacaaggccttctccacctgcacttcccacctcactgtggttaccctgttctatgggaccattaccttcatttatgtgatgcccaattttagctactcaactgaccagaacaaggtggtgtctgtgttgtacacagtggtgattcccatgttgaaccccctgatctacagcctcaggaacaaggagattaagggggctctgaagagagagcttgttagaaaaatactttctcatgatgcttgttattttagtagaacttcaaataatgatattacatag

SEQ ID NO: 58 - protein, 322 aa, Homo Sapiens
MNSLKDGNHTALTGFILLGLTDDPILRVILFMIILSGNLSIIILIRISSQLHHPMYFFLSHLAFADMAYSSSVTPNMLVNFLVERNTVSYLGCAIQLGSAAFFATVECVLLAAMAYDRFVAICSPLLYSTKMSTQVSVQLLLVVYIAGFLIAVSYTTSFYFLLFCGPNQVNHFFCDFAPLLELSCSDISVSTVVLSFSSGSIIVVTVCVIAVCYIYILITILKMRSTEGHHKAFSTCTSHLTVVTLFYGTITFIYVMPNFSYSTDQNKVVSVLYTVVIPMLNPLIYSLRNKEIKGALKRELVRKILSHDACYFSRTSNNDIT

SEQ ID NO: 59 - DNA, 930 bp, Homo Sapiens
  CDS (1)..(927)
atggaaggaataaataaaactgcaaagatgcagtttttctttcgtccattctcacctgaccctgaggtccagatgctgatttttgtggtcttcctgatgatgtatctgaccagcctcggtggaaatgctacaattgcagtcattgttcagatcaatcattccctccacacccccatgtactttttcctggctaatctggcagttctagaaatcttctatacatcttccatcaccccattggccttggcaaacctcctttcaatgggcaaaactcctgtttccatcacgggatgtggcacccagatgtttttctttgtcttcttgggtggggctgattgtgtcctgctggtagtcatggcttatgaccagtttatagcgatctgtcaccctctgcgatacaggctcatcatgagctggtccttgtgtgtggagctgctggtaggctccttggtgctggggttcctgttgtcactgccactcaccattttaatcttccatctcccattctgccacaatgatgagatctaccacttctactgtgacatgcctgcagtcatgcgcctggcttgtgcagacacacgcgttcacaagactgctctgtatatcatcagcttcatcgtccttagcatccccctctcattgatctccatctcctatgtcttcatcgtggtagccattttacggatccggtcagcagaagggcgccagcaagcctactctacctgctcttctcacatcttagtggtcctcctgcagtatggctgcaccagctttatatacttgtcccccagttccagctactctcctgagatgggccgggtggtatctgtggcctacacatttatcactcccattttaaaccccttgatctatagtttgaggaacaaggaactgaaagatgccctaaggaaagcattgagaaaattctag

SEQ ID NO: 60 - protein, 309 aa, Homo Sapiens
MEGINKTAKMQFFFRPFSPDPEVQMLIFVVFLMMYLTSLGGNATIAVIVQINHSLHTPMYFFLANLAVLEIFYTSSITPLALANLLSMGKTPVSITGCGTQMFFFVFLGGADCVLLVVMAYDQFIAICHPLRYRLIMSWSLCVELLVGSLVLGFLLSLPLTILIFHLPFCHNDEIYHFYCDMPAVMRLACADTRVHKTALYIISFIVLSIPLSLISISYVFIVVAILRIRSAEGRQQAYSTCSSHILVVLLQYGCTSFIYLSPSSSYSPEMGRVVSVAYTFITPILNPLIYSLRNKELKDALRKALRKF

SEQ ID NO: 61 - DNA, 951 bp, Homo Sapiens
  CDS (1)..(948)
atggttgaagaaaatcataccatgaaaaatgagtttatcctcacaggatttacagatcaccctgagctgaagactctgctgtttgtggtgttctttgccatctatctgatcaccgtggtggggaatattagtttggtggcactgatatttacacactgtcggcttcacacaccaatgtacatctttctgggaaatctggctcttgtggattcttgctgtgcctgtgctattacccccaaaatgttagagaacttcttttctgagggcaaaaggatttccctctatgaatgtgcagtacagttttattttctttgcactgtggaaactgcagactgctttcttctggcagcagtggcctatgaccgctatgtggccatctgcaacccactgcagtaccacatcatgatgtccaagaaactctgcattcagatgaccacaggcgccttcatagctggaaatctgcattccatgattcatgtagggcttgtatttaggttagttttctgtggattgaatcacatcaaccacttttactgtgatactcttcccttgtatagactctcctgtgttgaccctttcatcaatgaactggttctattcatcttctcaggttcagttcaagtctttaccataggtagtgtcttaatatcttatctctatattcttcttactattttcagaatgaaatccaaggagggaagggccaaagccttttctacttgtgcatcccacttttcatcagtttcattattctatggatctatttttttcctatacattagaccaaatttgcttgaagaaggaggtaatgatataccagctgctattttatttacaatagtagttcccttactaaatcctttcatttatagtctgagaaacaaggaagtaataagtgtcttaagaaaaattctgctgaaaataaaatctcaaggaagtgtgaacaaatga

SEQ ID NO: 62 - protein, 316 aa, Homo Sapiens
MVEENHTMKNEFILTGFTDHPELKTLLFVVFFAIYLITVVGNISLVALIFTHCRLHTPMYIFLGNLALVDSCCACAITPKMLENFFSEGKRISLYECAVQFYFLCTVETADCFLLAAVAYDRYVAICNPLQYHIMMSKKLCIQMTTGAFIAGNLHSMIHVGLVFRLVFCGLNHINHFYCDTLPLYRLSCVDPFINELVLFIFSGSVQVFTIGSVLISYLYILLTIFRMKSKEGRAKAFSTCASHFSSVSLFYGSIFFLYIRPNLLEEGGNDIPAAILFTIVVPLLNPFIYSLRNKEVISVLRKILLKIKSQGSVNK

SEQ ID NO: 63 - DNA, 939 bp, Homo Sapiens
  CDS (1)..(936)
atggatcagaaaaatggaagttctttcactggatttatcctactgggtttctctgacaggcctcagctggagctagtcctctttgtggttcttttgatcttctatatcttcactttgctggggaacaaaaccatcattgtattatctcacttggacccacatcttcacactcctatgtattttttcttctccaacctaagctttttggatctgtgttacacaaccggcattgttccacagctcctggttaatctcaggggagcagacaaatcaatctcctatggtggttgtgtagttcagctgtacatctctctaggcttgggatctacagaatgcgttctttttttagtgatggtatttgaccgctatgcagctgtttgcaggcccctccactacacagtagtcatgcacccttgtctgtatgtgctgatggcttctacttcatgggtcattggttttgccaactccctattgcagacggtgctcatcttgcttttaacactttgtggaagaaataaattagaacactttctttgtgaggttcctccattgctcaagcttgcctgtgttgacactactatgaatgaatctgaactcttctttgtcagtgtcattattcttcttgtacctgttgcattaatcatattctcctatagtcagattgtcagggcagtcatgaggataaagttagcaacagggcagagaaaagtgtttgggacatgtggctcccacctcacagtggtttccctgttctacggcacagctatctatgcttacctccagcccggcaacaactactctcaggatcagggcaagttcatctctctcttctacaccatcattacacccatgatcaaccccctcatatatacactgaggaacaaggatgtgaaaggagcacttaagaaggtgctctggaagaactacgactccagatga

SEQ ID NO: 64 - protein, 312 aa, Homo Sapiens [sequence omitted]

SEQ ID NO: 65 - DNA, 948 bp, Homo Sapiens
  CDS (1)..(945)
atgaccaatcagacacagatgatggaattcttgcttgtgagatttactgagaattgggtgctcctgaggctgcatgctttgctcttctcactgatctacctcacggctgtgctgatgaatttagtcatcattctcctcatgattctggaccatcgtctccacatggcaatgtactttttcctccgacatttgtccttcttagacctgtgtctcatttctgccacagtccccaaatccatcctcaactctgtcgcctccactgactccatctccttcctggggtgtgtgttgcagctcttcttggtggtactgctggctggatcagagattggcatccttactgccatgtcctatgaccgctatgctgccatctgctgccccctacactgtgaggctgtcatgagcagagggctctgtgtccagttgatggctctgtcctggctcaacagaggggccttgggactcttgtacacagctggaacattctctctgaatttttatggctctgatgagctacatcagttcttctgcgatgtccctgccctactaaagctcacttgttctaaagaacatgccatcattagtgtcagtgtggccattggggtctgttatgcattttcatgtttagtttgcattgtagtttcctatgtgtacattttctctgctgtgttaaggatatcacagagacagagacaatccaaagccttttccaactgtgtgcctcacctcattgttgtcactgtgtttcttgtaacaggtgctgttgcttatttaaagccagggtctgatgcaccttctattctagacttgctggtgtctgtgttctattctgtcgcacctccaaccttgaaccctgttatctactgtctgaagaacaaggacattaaatccgctctgagtaaagtcctgtggaatgttagaagcagtggggtaatgaaagatgactaa

SEQ ID NO: 66 - protein, 315 aa, Homo Sapiens
MTNQTQMMEFLLVRFTENWVLLRLHALLFSLIYLTAVLMNLVIILLMILDHRLHMAMYFFLRHLSFLDLCLISATVPKSILNSVASTDSISFLGCVLQLFLVVLLAGSEIGILTAMSYDRYAAICCPLHCEAVMSRGLCVQLMALSWLNRGALGLLYTAGTFSLNFYGSDELHQFFCDVPALLKLTCSKEHAIISVSVAIGVCYAFSCLVCIVVSYVYIFSAVLRISQRQRQSKAFSNCVPHLIVVTVFLVTGAVAYLKPGSDAPSILDLLVSVFYSVAPPTLNPVIYCLKNKDIKSALSKVLWNVRSSGVMKDD

SEQ ID NO: 67 - DNA, 921 bp, Homo Sapiens
  CDS (1)..(918)
atggtgactgagtttcttcttctcggcttctcccacctggccgacctccagggcttgctcttctctgtctttctcactatctacctgctgaccgtggcaggcaatttcctcattgtggtgctggtctccactgatgctgccctccagtcccctatgtacttcttcctgcgcaccctctcggccttggagattggctatacgtctgtcacggtccccctgctacttcaccacctccttactggccggcgccacatctctcgctctggatgtgctctccagatgttcttcttcctcttctttggcgccacggagtgctgcctcctggcagccatggcctatgaccgctatgcagccatctgtgaacccctccgctacccactgctgctgagccaccgggtgtgtctacagctagctgggtcggcgtgggcctgtggggtgctggtggggctgggccacacccctttcatcttctctttgcccttctgcggccccaataccatcccgcagttcttctgtgagatccagcctgtcctgcagctggtatgtggagacacctcgcttaatgaactgcagattatcctggcaacagccctcctcatcctctgcccctttggcctcatcctgggctcctacgggcgtatcctcgttaccatcttccggatcccatctgttgcgggccgccgcaaggccttctccacctgctcctcccacctgatcgtggtctccctcttctatggcaccgcactctttatctatattcgccctaaggccagctacgatccggccactgaccctctggtgtccctcttctatgctgtggtcacccccatcctcaaccccatcatctacagcctgcggaacacagaggtcaaagctgccctaaagagaaccatccagaaaacggtgcctatggagatttga

SEQ ID NO: 68 - protein, 306 aa, Homo Sapiens
MVTEFLLLGFSHLADLQGLLFSVFLTIYLLTVAGNFLIVVLVSTDAALQSPMYFFLRTLSALEIGYTSVTVPLLLHHLLTGRRHISRSGCALQMFFFLFFGATECCLLAAMAYDRYAAICEPLRYPLLLSHRVCLQLAGSAWACGVLVGLGHTPFIFSLPFCGPNTIPQFFCEIQPVLQLVCGDTSLNELQIILATALLILCPFGLILGSYGRILVTIFRIPSVAGRRKAFSTCSSHLIVVSLFYGTALFIYIRPKASYDPATDPLVSLFYAVVTPILNPIIYSLRNTEVKAALKRTIQKTVPMEI

SEQ ID NO: 69 - DNA, 978 bp, Homo Sapiens
  CDS (1)..(975)
atgaccaccataattctggaagtagataatcatacagtgacaacacgtttcattcttctggggtttccaacacgaccagccttccagcttctctttttctccattttcctggcaacctatctgctgacactgctggagaatcttcttatcatcttagctatccacagtgatgggcagctgcataagcccatgtacttcttcttgagccacctctccttcctggagatgtggtatgtcacagtcatcagccccaagatgcttgttgacttcctcagtcatgacaagagtatttccttcaatggctgcatgactcaactttacttttttgtgacctttgtctgcactgagtacatccttcttgctatcatggcctttgaccgctatgtagccatttgtaatccactacgctacccagtcatcatgaccaaccagctctgtggcacactggctggaggatgctggttctgtggactcatgactgccatgattaagatggtttttatagcacaacttcactactgtggcatgcctcagatcaatcactacttttgtgatatctctccactccttaacgtctcctgtgaggatgcctcacaggctgagatggtggacttcttcttggccctcatggtcattgctattcctctttgtgttgtggtggcatcctacgctgctatccttgccaccatcctcaggatcccttctgctcagggccgccaaaaggcattctccacctgtgcctcccacctgaccgtcgtaattctcttctattccatgacacttttcacctatgcccgtcccaaactcatgtatgcctacaattccaacaaagtggtatctgttctctacactgtcattgttccactcctcaaccccatcatttactgtctgaggaaccatgaagtaaaggcagccctcagaaagaccatacattgcagaggaagtgggccccagggaaatggggctttcagtagttaa

SEQ ID NO: 70 - protein, 325 aa, Homo Sapiens
MTTIILEVDNHTVTTRFILLGFPTRPAFQLLFFSIFLATYLLTLLENLLIILAIHSDGQLHKPMYFFLSHLSFLEMWYVTVISPKMLVDFLSHDKSISFNGCMTQLYFFVTFVCTEYILLAIMAFDRYVAICNPLRYPVIMTNQLCGTLAGGCWFCGLMTAMIKMVFIAQLHYCGMPQINHYFCDISPLLNVSCEDASQAEMVDFFLALMVIAIPLCVVVASYAAILATILRIPSAQGRQKAFSTCASHLTVVILFYSMTLFTYARPKLMYAYNSNKVVSVLYTVIVPLLNPIIYCLRNHEVKAALRKTIHCRGSGPQGNGAFSS

SEQ ID NO: 71 - DNA, 915 bp, Homo Sapiens
  CDS (1)..(912)
atgctggctagaaacaactccttagtgactgaatttattcttgctggattaacagatcatccagagttccagcaacccctctttttcctgtttctagtggtctacattgtcaccatggtaggcaaccttggcttgatcattcttttcggtctaaattctcacctccacacaccaatgtactatttcctcttcaatctctccttcattgatctctgttactcctctgttttcactcccaaaatgctaatgaactttgtatcaaaaaagaatattatctcctatgttgggtgcatgactcagctgtttttctttctcttttttgtcatctctgaatgttacatgttgacctcaatggcatatgatcgctatgtggccatctgtaatccattgctgtataaggtcaccatgtcccatcaggtctgttctatgctcacttttgctgcttacataatgggattggctggagccacggcccacaccgggtgcatgcttagactcaccttctgcagtgctaatatcatcaaccattacttgtgtgacatactccccctcctccagctttcctgcaccagcacctatgtcaacgaggtggttgttctcattgttgtgggtattaatatcatggtacccagttgtaccatcctcatttcttatgttttcattgtcactagcattcttcatatcaaatccactcaaggaagatcaaaagccttcagtacttgtagctctcatgtcattgctctgtctctgttttttgggtcagcggcattcatgtatattaaatattcttctggatctatggagcagggaaaagtttcttctgttttctacactaatgtggtgcccatgctcaatcctctcatctacagtttgaggaacaaggatgtcaaagttgcactgaggaaagctctgatt

SEQ ID NO: 72 - protein, 304 aa, Homo Sapiens
MLARNNSLVTEFILAGLTDHPEFQQPLFFLFLVVYIVTMVGNLGLIILFGLNSHLHTPMYYFLFNLSFIDLCYSSVFTPKMLMNFVSKKNIISYVGCMTQLFFFLFFVISECYMLTSMAYDRYVAICNPLLYKVTMSHQVCSMLTFAAYIMGLAGATAHTGCMLRLTFCSANIINHYLCDILPLLQLSCTSTYVNEVVVLIVVGINIMVPSCTILISYVFIVTSILHIKSTQGRSKAFSTCSSHVIALSLFFGSAAFMYIKYSSGSMEQGKVSSVFYTNVVPMLNPLIYSLRNKDVKVALRKAL

SEQ ID NO: 73 - DNA, 942 bp, Homo Sapiens
  CDS (1)..(939)
atgctggctagaaacaactccttagtgactgaatttattcttgctggattaacagatcatccagagttccggcaacccctctttttcctgtttctagtgatctacattgtcaccatggtaggcaaccttggcttgatcactcttttcggtctaaattctcacctccacacaccaatgtactatttcctcttcaatctctccttcattgatctctgttactcctctgttttcactcccaaaatgctaatgaactttgtgtcaaaaaagaatattatctccaatgttgggtgcatgactcggctgtttttctttctctttttcgtcatctctgaatgttacatgttgacttcaatggcatatgatcgctatgtggccatctgtaatccattgctgtataaggtcaccatgtcccatcaggtctgttctatgctcacttttgctgcttacataatgggattggctggagccacggcccacaccgggtgcatgcttagactcaccttctgcagtgctaatatcatcaaccattacttgtgtgacatactccccctcctccagctttcctgcaccagcacctatgtcaacgaggtggttgttctcattgttgtgggtactaatatcacggtacccagttgtaccatcctcatttcttatgttttcattgtcactagcattcttcatatcaaatccactcaaggaagatcaaaagccttcagtacttgtagctctcatgtcattgctctgtctctgttttttgggtcagcggcattcatgtatattaaatattcttctggatctatggagcagggaaaagtttcttctgttttctacactaatgtggtgcccatgctcaatcccctcatctacagtttgaggaacaaggatgtcaaagttgcactgaggaaagctctgattaaaattcagaggagaaatatattctaa

SEQ ID NO: 74 - protein, 313 aa, Homo Sapiens
MLARNNSLVTEFILAGLTDHPEFRQPLFFLFLVIYIVTMVGNLGLITLFGLNSHLHTPMYYFLFNLSFIDLCYSSVFTPKMLMNFVSKKNIISNVGCMTRLFFFLFFVISECYMLTSMAYDRYVAICNPLLYKVTMSHQVCSMLTFAAYIMGLAGATAHTGCMLRLTFCSANIINHYLCDILPLLQLSCTSTYVNEVVVLIVVGTNITVPSCTILISYVFIVTSILHIKSTQGRSKAFSTCSSHVIALSLFFGSAAFMYIKYSSGSMEQGKVSSVFYTNVVPMLNPLIYSLRNKDVKVALRKALIKIQRRNIF

SEQ ID NO: 75 - DNA, 969 bp, Homo Sapiens
  CDS (1)..(966)
atgagccctgagaaccagagcagcgtgtccgagttcctcctcctgggcctccccatccggccagagcagcaggccgtgttcttcgccctgttcctgggcatgtacctgaccacggtgctggggaacctgctcatcatgctgctcatccagctagactctcaccttcacacccccatgtacttcttccttagccacttggccctcactgacatctccttttcatctgtcactgtccctaagatgctgatgaacatgcagactcagcacctagccgtcttttacaagggatgcatttcacagacatattttttcatattttttgctgacttagacagtttccttatcacttcaatggcatatgacaggtatgtggccatctgtcatcctctacattatgccaccatcatgactcagagccagtgtgtcatgctggtggctgggtcctgggtcatcgcttgtgcgtgtgctcttttgcataccctcctcctggcccagctttccttctgtgctgaccacatcatccctcactacttctgtgaccttggtgccctgctcaagttgtcctgctcagacacctccctcaatcagttagcaatctttacagcagcattgacagccattatgcttccattcctgtgcatcctggtttcttatggtcacattggggtcaccatcctccagattccctctaccaagggcatatgcaaagccttgtccacttgtggatcccacctctcagtggtgactatctattatcggacaattattggtctctattttcttcccccatccagcaacaccaatgacaagaacataattgcttcagtgatatacacagcagtcactcccatgttgaacccattcatttacagtctgagaaataaagacattaagggagccctaagaaaactcttgagtaggtcaggcgcagtggctcatgcctgtaatctcagcactttgggaggctga

SEQ ID NO: 76 - protein, 322 aa, Homo Sapiens [sequence omitted]

SEQ ID NO: 77 - DNA, 972 bp, Homo Sapiens
  CDS (1)..(969)
atgtggcagaagaatcagacctctctggcagacttcatccttgaggggctcttcgatgactcccttacccaccttttccttttctccttgaccatggtggtcttccttattgcggtgagtggcaacaccctcaccattctcctcatctgcattgatccccagcttcatacaccaatgtatttcctgctcagccagctctccctcatggatctgatgcatgtctccacaatcatcctgaagatggctaccaactacctatctggcaagaaatctatctcctttgtgggctgtgcaacccagcacttcctctatttgtgtctaggtggtgctgaatgttttctcttagctgtcatgtcctatgaccgctatgttgccatctgtcatccactgcgctatgctgtgctcatgaacaagaaggtgggactgatgatggctgtcatgtcatggttgggggcatccgtgaactccctaattcacatggcgatcttgatgcacttccctttctgtgggcctcggaaagtctaccacttctactgtgagttcccagctgttgtgaagttggtatgtggcgacatcactgtgtatgagaccacagtgtacatcagcagcattctcctcctcctccccatcttcctgatttctacatcctatgtcttcatccttcaaagtgtcattcagatgcgctcatctgggagcaagagaaatgcctttgccacttgtggctcccacctcacggtggtttctctttggtttggtgcctgcatcttctcctacatgagacccaggtcccagtgcactctattgcagaacaaagttggttctgtgttctacagcatcattacgcccacattgaattctctgatttatactctccggaataaagatgtagctaaggctctgagaagagtgctgaggagagatgttatcacccagtgcattcaacgactgcaattgtggttgccccgagtgtag

SEQ ID NO: 78 - protein, 323 aa, Homo Sapiens
MWQKNQTSLADFILEGLFDDSLTHLFLFSLTMVVFLIAVSGNTLTILLICIDPQLHTPMYFLLSQLSLMDLMHVSTIILKMATNYLSGKKSISFVGCATQHFLYLCLGGAECFLLAVMSYDRYVAICHPLRYAVLMNKKVGLMMAVMSWLGASVNSLIHMAILMHFPFCGPRKVYHFYCEFPAVVKLVCGDITVYETTVYISSILLLLPIFLISTSYVFILQSVIQMRSSGSKRNAFATCGSHLTVVSLWFGACIFSYMRPRSQCTLLQNKVGSVFYSIITPTLNSLIYTLRNKDVAKALRRVLRRDVITQCIQRLQLWLPRV

SEQ ID NO: 79 - DNA, 969 bp, Homo Sapiens
  CDS (1)..(966)
atgaattccctgaagcacgggaatcacaccgctctgacggggttcatcctattgggcttaacagatgatccaatccttcgagtcatcctcttcatgatcatcctatctggtaatctcagcataattattcttatcagaatttcttctcagctccatcatcctatgtatttctttctgagccacttggcttttgctgacatggcctattcatcttctgtcacacccaacatgcttgtaaacttcctggtggagagaaatacagtctcctaccttggatgtgccatccagcttggttcagcggctttctttgcaacagtcgaatgcgtccttctggctgccatggcctatgaccgctttgtggcaatttgcagtccactgctttattcaaccaaaatgtccacacaagtcagtgtccagctactcttagtagtttacatagctggttttctcattgctgtctcctatactacttccttctattttttactcttctgtggaccaaatcaagtcaatcattttttctgtgatttcgctcccttacttgaactctcctgttctgatatcagtgtctccacagttgttctctcattttcttctggatccatcattgtggtcactgtgtgtgtcatagccgtctgctacatctatatcctcatcaccatcctgaagatgcgctccactgaggggcaccacaaggctttctccacgtgcacttcccacctcactgtggttaccctgttctatgggaccattaccttcatttatgtgatgcccaattttagctactcaactgaccagaacaaggtggtgtctgtgttgtacacagtggtgattcccatgttgaaccccctgatctacagcctcaggaacaaggagattaagggggctctgaagagagagcttgttagaaaaatactttctcatgatgcttgttattttagtagaacttcaaataatgatattacatag

SEQ ID NO: 80 - protein, 322 aa, Homo Sapiens
MNSLKHGNHTALTGFILLGLTDDPILRVILFMIILSGNLSIIILIRISSQLHHPMYFFLSHLAFADMAYSSSVTPNMLVNFLVERNTVSYLGCAIQLGSAAFFATVECVLLAAMAYDRFVAICSPLLYSTKMSTQVSVQLLLVVYIAGFLIAVSYTTSFYFLLFCGPNQVNHFFCDFAPLLELSCSDISVSTVVLSFSSGSIIVVTVCVIAVCYIYILITILKMRSTEGHHKAFSTCTSHLTVVTLFYGTITFIYVMPNFSYSTDQNKVVSVLYTVVIPMLNPLIYSLRNKEIKGALKRELVRKILSHDACYFSRTSNNDIT

SEQ ID NO: 81 - DNA, 936 bp, Homo Sapiens
  CDS (1)..(933)
atggggactggaaatgacaccactgtggtagagtttactcttttggggttatctgaggatactacagtttgtgctattttatttcttgtgtttctaggaatttatgttgtcaccttaatgggtaatatcagcataattgtattgatcagaagaagtcatcatcttcatacacccatgtacattttcctctgccatttggcctttgtagacattgggtactcctcatcagtcacacctgtcatgctcatgagcttcctaaggaaagaaacctctctccctgttgctggttgtgtggcccagctctgttctgtagtgacgtttggtacggccgagtgcttcctgctggctgccatggcctatgatcgctatgtggccatctgctcacccctgctctactctacctgcatgtcccctggagtctgcatcatcttagtgggcatgtcctacctgggtggatgtgtgaatgcttgcacattcattggctgcttattaagactgtccttctgtgggccaaataaagtcaatcactttttctgtgactattcaccacttttgaagcttgcttgttcccatgattttacttttgaaataattccagctatctcttgtggatctatcattgtggccactgtgtgtgtcatagccatatcctacatctatatcctcatcaccatcctgaagatgcactccaccaagggccgccacaaggctttctccacgtgcacctcccacctcagtgcagtcactgtgttatatgggaccatcaccttcatttatgtgatgcccaagtccagctactcaactgaccagaacaaggtggtgtctgtgttatacaccgtggtgattcccatgttgaaccccctgatctacagcctcaggaacaaggagattaagggggctctgaagagagagcttagaataaaaatattttcttga

SEQ ID NO: 82 - protein, 311 aa, Homo Sapiens
MGTGNDTTVVEFTLLGLSEDTTVCAILFLVFLGIYVVTLMGNISIIVLIRRSHHLHTPMYIFLCHLAFVDIGYSSSVTPVMLMSFLRKETSLPVAGCVAQLCSVVTFGTAECFLLAAMAYDRYVAICSPLLYSTCMSPGVCIILVGMSYLGGCVNACTFIGCLLRLSFCGPNKVNHFFCDYSPLLKLACSHDFTFEIIPAISCGSIIVATVCVIAISYIYILITILKMHSTKGRHKAFSTCTSHLSAVTVLYGTITFIYVMPKSSYSTDQNKVVSVLYTVVIPMLNPLIYSLRNKEIKGALKRELRIKIFS

SEQ ID NO: 83 - DNA, 1032 bp, Homo Sapiens
  CDS (1)..(1029)
atggctctttatttttcactcatactccatggtatgagtgatcttttctttctctctacaggtcatccaagagcgagctgtaggatggaggccatgaaactattaaatcaatctcaagtgtcagaattcattttgctgggactgaccagctcccaggatgtagagtttcttctctttgccctcttctcggttatctatgtggtcacagttttgggtaaccttcttattatagtcacagtgtttaacacccctaacctgaatactcccatgtattttctccttggtaatctctcttttgtagatatgacccttgcttcttttgccacccctaaggtgattctgaacttgttaaaaaagcagaaggtaatttcttttgctgggtgcttcactcagatatttctccttcacttactgggtggggttgaaatggtactgttggtctccatggcttttgacagatatgtggccatttgtaagcccctacactacatgaccatcatgaacaagaaggtatgtgttttgcttgtagtgacctcatggctcttgggtctccttcactcagggtttcagataccatttgctgtgaacttgcccttttgtggtcccaatgtggtagacagcattttttgtgacctccctttggttactaagcttgcctgtatagacatatattttgtacaggtagtcattgttgccaacagtggcataatctccctgagctgtttcattattttgcttatctcctacagtctgatcctcataaccattaagaaccactctcctactgggcaatctaaagcccgttccactttgactgctcacatcacagtggtgattctcttctttggcccatgcatctttatctacatttggcccttcggcaaccactctgtagataagttccttgctgtgttttataccatcatcactcctatcttgaatccaattatctatactctgagaaacaaagaaatgaagatatccatgaaaaaactctggagagcttttgtgaattctagagaagatacttag

SEQ ID NO: 84 - protein, 343 aa, Homo Sapiens
MALYFSLILHGMSDLFFLSTGHPRASCRMEAMKLLNQSQVSEFILLGLTSSQDVEFLLFALFSVIYVVTVLGNLLIIVTVFNTPNLNTPMYFLLGNLSFVDMTLASFATPKVILNLLKKQKVISFAGCFTQIFLLHLLGGVEMVLLVSMAFDRYVAICKPLHYMTIMNKKVCVLLVVTSWLLGLLHSGFQIPFAVNLPFCGPNVVDSIFCDLPLVTKLACIDIYFVQVVIVANSGIISLSCFIILLISYSLILITIKNHSPTGQSKARSTLTAHITVVILFFGPCIFIYIWPFGNHSVDKFLAVFYTIITPILNPIIYTLRNKEMKISMKKLWRAFVNSREDT

SEQ ID NO: 85 - DNA, 939 bp, Homo Sapiens
  CDS (1)..(936)
atggatgaagccaatcactctgtggtctctgagtttgtgttcctgggactctctgactcgcggaagatccagctcctcctcttcctctttttctcagtgttctatgtatcaagcctgatgggaaatctcctcattgtgctaactgtgacctctgaccctcgtttacagtcccccatgtacttcctgctggccaacctttccatcatcaatttggtattttgttcctccacagctcccaagatgatttatgaccttttcaggaagcacaagaccatctcttttgggggctgtgtagttcagatcttctttatccatgcagttgggggaactgagatggtgctgctcatagccatggcttttgaccgatatgtggccatatgtaagcctctccactacctgaccatcatgaacccacaaaggtgcattttgtttttagtcatttcctggattataggtattattcactcagtgattcagttggcttttgttgtagacctgctgttctgtggccctaatgaattagatagtttcttttgtgatcttcctcgatttatcaaactggcttgcatagagacctacacattgggattcatggttactgccaatagtggatttatttctctggcttcttttttaattctcataatctcttacatctttattttggtgactgttcagaaaaaatcttcaggtggtatattcaaggctttctctatgctgtcagctcatgtcattgtggtggttttggtctttgggccattaatctttttctatatttttccatttcccacatcacatcttgataaattccttgccatctttgatgcagttatcactcccgttttgaatccagtcatctatacttttagaaataaagagatgatggtggcaatgagaagacgatgctctcagtttgtgaattacagtaaaatcttttaa

SEQ ID NO: 86 - protein, 312 aa, Homo Sapiens
MDEANHSVVSEFVFLGLSDSRKIQLLLFLFFSVFYVSSLMGNLLIVLTVTSDPRLQSPMYFLLANLSIINLVFCSSTAPKMIYDLFRKHKTISFGGCVVQIFFIHAVGGTEMVLLIAMAFDRYVAICKPLHYLTIMNPQRCILFLVISWIIGIIHSVIQLAFVVDLLFCGPNELDSFFCDLPRFIKLACIETYTLGFMVTANSGFISLASFLILIISYIFILVTVQKKSSGGIFKAFSMLSAHVIVVVLVFGPLIFFYIFPFPTSHLDKFLAIFDAVITPVLNPVIYTFRNKEMMVAMRRRCSQFVNYSKIF

SEQ ID NO: 87 - DNA, 978 bp, Homo Sapiens
  CDS (1)..(975)
atgttcctttacctttgcttcatttttcagaggacatgcagtgaggagatggaagaggaaaatgcaacattgctgacagagtttgttctcacaggatttttacatcaacctgactgtaaaataccgctcttcctggcattcttggtaatatatctcatcaccatcatggggaatcttggtctaattgttctcatctggaaagaccctcaccttcatatcccaatgtacttattccttgggagtttagcctttgtggatgcttcgttatcatccacagtgactccgaagatgctgatcaacttcttagctaagagtaagatgatatctctctctgaatgcatggtacaatttttttcccttgtaaccactgtaaccacagaatgttttctcttggcaacaatggcatatgatcgctatgtagccatttgcaaagctttactttatccagtcattatgaccaatgaactatgcattcagctattagtcttgtcatttataggtggccttcttcatgctttaatccatgaagctttttcattcagattaaccttctgtaattccaacataatacaacacttttactgtgacattatcccattgttaaagatttcctgtactgattcctctattaactttctaatggtttttattttcgcaggttctgttcaagtttttaccattggaactattcttatatcttatacaattatcctctttacaatcttagaaaagaagtctatcaaagggatacgaaaagctgtctccacctgtggggctcatctcttatctgtatctttatactatggccccctcaccttcaaatatctgggctctgcatctccgcaagcagatgaccaagatatgatggagtctctattttacactgtcatagttcctttattaaatcccatgatctacagcctgagaaacaagcaagtaatagcttcattcacaaaaatgttcaaaagcaatgtttag

SEQ ID NO: 88 - protein, 325 aa, Homo Sapiens
MFLYLCFIFQRTCSEEMEEENATLLTEFVLTGFLHQPDCKIPLFLAFLVIYLITIMGNLGLIVLIWKDPHLHIPMYLFLGSLAFVDASLSSTVTPKMLINFLAKSKMISLSECMVQFFSLVTTVTTECFLLATMAYDRYVAICKALLYPVIMTNELCIQLLVLSFIGGLLHALIHEAFSFRLTFCNSNIIQHFYCDIIPLLKISCTDSSINFLMVFIFAGSVQVFTIGTILISYTIILFTILEKKSIKGIRKAVSTCGAHLLSVSLYYGPLTFKYLGSASPQADDQDMMESLFYTVIVPLLNPMIYSLRNKQVIASFTKMFKSNV

SEQ ID NO: 89 - DNA, 885 bp, Homo Sapiens
  CDS (1)..(885)
atgcagactgactttgtcctgttgtgcttcagacagaatccacaggagctgaaagtactttttgttatgttcttgctcttctacattttgaccatggtgggcaacctgctcattgtagtgaccgtaactgtcagtgagaccctgggctcaccaatgtccttctttcttgctggcttaacatttatagatatcatttattcttcatccatttcccccagattgatttcagacttgttctttgggaataattccatatccttccaatctttcatggcccagctctttatcgagcacctttttggtgggtcagaggtctttctcctgttggtgatggcctatgaccgctatgtggccatctgtaagcccttgcattatttggttatcatgagacaatgggtgtgtgttttgctgctggtagtgtcctgggttggaggatttctgcaatcagtatttcaacttagcattatttatgggctcccattctgtggccccaatgtcattgatcattttttctgtgacatgtatcccttattgaaactggcctgcactgacacccatgttattggcctcttagtggtggccaatggaggactgtcttgcactattgcgtttctgctcttactcatctcttatggtgtcatcctgcactctctaaagaaacttagtcagaaagggaggcaaaaagcccactcaacctgcagttcccacatcactgtggttgtcttcttctttgttccttgtatttttatgtgtgctagacctgctaggaccttctccattgacaaatcagtgagtgtgttttatacagtcataaccccaatgctgaaccccttaatctacactctgagaaattctgagatgacaagtgctatgaagaagctttag

SEQ ID NO: 90 - protein, 294 aa, Homo Sapiens
MQTDFVLLCFRQNPQELKVLFVMFLLFYILTMVGNLLIVVTVTVSETLGSPMSFFLAGLTFIDIIYSSSISPRLISDLFFGNNSISFQSFMAQLFIEHLFGGSEVFLLLVMAYDRYVAICKPLHYLVIMRQWVCVLLLVVSWVGGFLQSVFQLSIIYGLPFCGPNVIDHFFCDMYPLLKLACTDTHVIGLLVVANGGLSCTIAFLLLLISYGVILHSLKKLSQKGRQKAHSTCSSHITVVVFFFVPCIFMCARPARTFSIDKSVSVFYTVITPMLNPLIYTLRNSEMTSAMKKL

SEQ ID NO: 91 - DNA, 1014 bp, Homo Sapiens
  CDS (1)..(1011)
atggaagggaaaaatcaaaccaatatctctgaatttctcctcctgggcttctcaagttggcaacaacagcaggtgctactctttgcacttttcctgtgtctctatttaacagggctgtttggaaacttactcatcttgctggccattggctcggatcactgccttcacacacccatgtatttcttccttgccaatctgtccttggtagacctctgccttccctcagccacagtccccaagatgctactgaacatccaaacccaaacccaaaccatctcctatcccggctgcctggctcagatgtatttctgtatgatgtttgccaatatggacaattttcttctcacagtgatggcatatgaccgttacgtggccatctgtcaccctttacattactccaccattatggccctgcgcctctgtgcctctctggtagctgcaccttgggtcattgccattttgaaccctctcttgcacactcttatgatggcccatctgcacttctgctctgataatgttatccaccatttcttctgtgatatcaactctctcctccctctgtcctgttccgacaccagtcttaatcagttgagtgttctggctacggtggggctgatctttgtggtaccttcagtgtgtatcctggtatcctatatcctcattgtttctgctgtgatgaaagtcccttctgcccaaggaaaactcaaggctttctctacctgtggatctcaccttgccttggtcattcttttctatggagcaaacacaggggtctatatgagccccttatccaatcactctactgaaaaagactcagccgcatcagtcatttttatggttgtagcacctgtgttgaatccattcatttacagtttaagaaacaatgaactgaaggggactttaaaaaagaccctaagccggccgggcgcggtggctcacgcctgtaatcccagcactttgggaggccgaggcgggtggatcatgaggtcaggagatcgagaccatcctggctaa

SEQ ID NO: 92 - protein, 337 aa, Homo Sapiens [sequence omitted]

SEQ ID NO: 93 - DNA, 945 bp, Homo Sapiens
  CDS (1)..(942)
atggccaagaataatctcaccagagtaaccgaattcattctcatgggctttatggaccaccccaaattggagattcccctctttctggtgtttctgagtttctacctagtcacccttcttgggaatgtggggatgattatgttaatccaagtagatgtcaaactctacaccccaatgtacttcttcctgagccacctctccctgctggatgcctgttacacctcagtcatcacccctcagatcctagccacattggccacaggcaaaacggtcatctcctacggccactgtgctgcccagttctttttattcaccatctgtgcaggcacagagtcgtttctgctggcagtgatggcctatgatcgctatgctgccattcgcaacccactgctctataccgtggccatgaatcccaggctctgctggagcctggtggtaggagcctatgtctgtggggtgtcaggagccatcctgcgtaccacttgcaccttcaccctctccttctgtaaggacaatcaaataaacttcttcttctgtgacctcccacccctgctgaagcttgcctgcagtgacacagcaaacatcgagattgtcatcatcttctttggcaattttgtgattttggccaatgcctccgtcatcctgatttcctatctgctcatcatcaagaccattttgaaagtgaagtcttcaggtggcagggccaagactttctccacatgtgcctctcacatcactgctgtggcccttttctttggagcccttatcttcatgtatctgcaaagtggctcaggcaaatctctggaggaagacaaagtcgtgtctgtcttctatacagtggtcatccccatgctgaaccctctgatctacagcttaagaaacaaagatgtaaaagacgccttcagaaaggtcgctaggagactccaggtgtccctgagcatgtag

SEQ ID NO: 94 - protein, 314 aa, Homo Sapiens
MAKNNLTRVTEFILMGFMDHPKLEIPLFLVFLSFYLVTLLGNVGMIMLIQVDVKLYTPMYFFLSHLSLLDACYTSVITPQILATLATGKTVISYGHCAAQFFLFTICAGTESFLLAVMAYDRYAAIRNPLLYTVAMNPRLCWSLVVGAYVCGVSGAILRTTCTFTLSFCKDNQINFFFCDLPPLLKLACSDTANIEIVIIFFGNFVILANASVILISYLLIIKTILKVKSSGGRAKTFSTCASHITAVALFFGALIFMYLQSGSGKSLEEDKVVSVFYTVVIPMLNPLIYSLRNKDVKDAFRKVARRLQVSLSM

SEQ ID NO: 95 - DNA, 945 bp, Homo Sapiens
  CDS (1)..(942)
atggaccagatcaaccacactaatgtgaaggagtttttcttcctggaacttacacgttcccgagagctggagtttttcttgtttgtggtcttctttgctgtgtatgtagcaacagtcctgggaaatgcactcattgtggtcactattacctgtgagtcccgcctacacactcctatgtactttctcctgcggaacaaatcagtcctggacatcgttttttcatctatcaccgtccccaagttcctggtggatcttttatcagacaggaaaaccatctcctacaatgactgcatggcacagatctttttcttccactttgctggtggggcagatatttttttcctctctgtgatggcctatgacagataccttgcaatcgccaagcccctgcactatgtgaccatgatgaggaaagaggtgtgggtggccttggtggtggcttcttgggtgagtggtggtttgcattcaatcatccaggtaattctgatgcttccattccccttctgtggccccaacacactggatgccttctactgttatgtgctccaggtggtaaaactggcctgcactgacacctttgctttggagcttttcatgatctctaacaacggactggtgaccctgctctggttcctcctgctcctgggctcctacactgtcattctggtgatgctgagatcccactctggggaggggcggaacaaggccctctccacgtgcacgtcccacatgctggtggtgactcttcacttcgtgccttgtgtttacatctactgccggcccttcatgacgctgcccatggacacaaccatatccattaataacacggtcattacccccatgctgaaccccatcatctattccctgagaaatcaagagatgaagtcagccatgcagaggctgcagaggagacttgggccttccgagagcagaaaatgggggtga

SEQ ID NO: 96 - protein, 314 aa, Homo Sapiens
MDQINHTNVKEFFFLELTRSRELEFFLFVVFFAVYVATVLGNALIVVTITCESRLHTPMYFLLRNKSVLDIVFSSITVPKFLVDLLSDRKTISYNDCMAQIFFFHFAGGADIFFLSVMAYDRYLAIAKPLHYVTMMRKEVWVALVVASWVSGGLHSIIQVILMLPFPFCGPNTLDAFYCYVLQVVKLACTDTFALELFMISNNGLVTLLWFLLLLGSYTVILVMLRSHSGEGRNKALSTCTSHMLVVTLHFVPCVYIYCRPFMTLPMDTTISINNTVITPMLNPIIYSLRNQEMKSAMQRLQRRLGPSESRKWG

SEQ ID NO: 97 - DNA, 993 bp, Homo Sapiens
  CDS (1)..(990)
atgttctttattattcattctttggttacttctgtttttctaacagctttgggaccccagaacagaacaatgcattttgtgactgagtttgtcctcctgggtttccatggtcaaagggagatgcagagctgcttcttctcattcatcctggttctctatctcctgacactgctagggaatggagctattgtctgtgcagtgaaattggacaggcggctccacacacccatgtacatccttctgggaaactttgcctttctagagatctggtacatttcctccactgtcccaaacatgctagtcaatatcctctctgagattaaaaccatctccttctctggttgcttcctgcaattctatttctttttttcactgggtacaacagagtgtttctttttatcagttatggcttatgatcggtacctggccatctgtcgtccattacactacccctccatcatgactgggaagttctgtataattctggtctgtgtatgctgggtaggcggatttctctgctatccagtccctattgttcttatctcccaacttcccttctgtgggcccaacatcattgaccacttggtgtgtgacccaggcccattgtttgcactggcctgcatctctgctccttccactgagcttatctgttacaccttcaactcgatgattatctttgggcccttcctctccatcttgggatcttacactctggtcatcagagctgtgctttgtattccctctggtgctggtcgaactaaagctttctccacatgtgggtcccacctaatggtggtgtctctattctatggaacccttatggtgatgtatgtgagcccaacatcagggaacccagcaggaatgcagaagatcatcactctggtatacacagcaatgactccattcttaaatccccttatctatagtcttcgaaacaaagacatgaaagatgctctaaagagagtcctggggttaacagttagccaaaactga

SEQ ID NO: 98 - protein, 330 aa, Homo Sapiens
MFFIIHSLVTSVFLTALGPQNRTMHFVTEFVLLGFHGQREMQSCFFSFILVLYLLTLLGNGAIVCAVKLDRRLHTPMYILLGNFAFLEIWYISSTVPNMLVNILSEIKTISFSGCFLQFYFFFSLGTTECFFLSVMAYDRYLAICRPLHYPSIMTGKFCIILVCVCWVGGFLCYPVPIVLISQLPFCGPNIIDHLVCDPGPLFALACISAPSTELICYTFNSMIIFGPFLSILGSYTLVIRAVLCIPSGAGRTKAFSTCGSHLMVVSLFYGTLMVMYVSPTSGNPAGMQKIITLVYTAMTPFLNPLIYSLRNKDMKDALKRVLGLTVSQN

SEQ ID NO: 99 - DNA, 933 bp, Homo Sapiens
  CDS (1)..(930)
atggcagagatgaacctcaccttggtgaccgagttcctccttattgcattcactgaatatcctgaatgggcactccctctcttcctcttgttattatttatgtatctcatcaccgtattggggaacttagagatgattattctgatcctcatggatcaccagctccacgctccaatgtatttccttctgagtcacctcgctttcatggacgtctgctactcatctatcactgtcccccagatgctggcagtgctgctggagcatggggcagctttatcttacacacgctgtgctgctcagttctttctgttcaccttctttggttccatcgactgctacctcttggccctcatggcctatgaccgctacttggctgtgtgccagcccctgctttatgtcaccatcctgacacagcaggcccgcttgagtcttgtggctggggcttacgttgctggtctcatcagtgccttggtgcggacagtctcagccttcactctctccttctgtggaaccagtgagattgactttattttctgtgacctccctcctctgttaaagttgacctgtggggagagctacactcaagaagtgctgattattatgtttgccatttttgtcatccctgcttccatggtggtgatcttggtgtcctacctgtttatcatcgtggccatcatggggatccctgctggaagccaggccaagaccttctccacctgcacctcccacctcactgctgtgtcactcttctttggtaccctcatcttcatgtacttgagaggtaactcagatcagtcttcggagaagaatcgggtagtgtctgtgctttacacagaggtcatccccatgttgaatcccctcatctacagcctgaggaacaaggaagtgaaggaggccctgagaaaaattctcaatagagccaagttgtcctaa

SEQ ID NO: 100 - protein, 310 aa, Homo Sapiens
MAEMNLTLVTEFLLIAFTEYPEWALPLFLLLLFMYLITVLGNLEMIILILMDHQLHAPMYFLLSHLAFMDVCYSSITVPQMLAVLLEHGAALSYTRCAAQFFLFTFFGSIDCYLLALMAYDRYLAVCQPLLYVTILTQQARLSLVAGAYVAGLISALVRTVSAFTLSFCGTSEIDFIFCDLPPLLKLTCGESYTQEVLIIMFAIFVIPASMVVILVSYLFIIVAIMGIPAGSQAKTFSTCTSHLTAVSLFFGTLIFMYLRGNSDQSSEKNRVVSVLYTEVIPMLNPLIYSLRNKEVKEALRKILNRAKLS

SEQ ID NO: 101 - DNA, 936 bp, Homo Sapiens
  CDS (1)..(933)
atgtccaacgccagcctactgacagcgttcatcctcatgggccttccccatgccccagcgctggacgcccccctctttggagtcttcctggtggtttacgtgctcactgtgctggggaacctcctcatcctgctggtgatcagggtggattctcacctccacaccaccatgtactacttcctcaccaacctgtcgttcattgacatgtggttctccactgtcacggtgcccaaattgctgatgactttggtgttcccaagtggcagggctatctccttccacagctgcatggctcagctctatttctttcacttcctagggggcaccgagtgtttcctctacagggtcatgtcctgtgatcgctacctggccatcagttacccgctcaggtacaccagcatgatgactgggcgctcgtgtactcttctggccaccagcacttggctcagtggctctctgcactctgctgtccaggccatattgactttccatttgccctactgtggacccaactggatccagcactatttgtgtgatgcaccgcccatcctgaaactggcctgtgcagacacctcagccatagagactgtcatttttgtgactgttggaatagtggcctcgggctgctttgtcctgatagtgctgtcctatgtgtccatcgtctgttccatcctgcggatccgcacctcagaggggaagcacagagcctttcagacctgtgcctcccactgtatcgtggtcctttgcttctttggccctggtcttttcatttacctgaggccaggctccaggaaagctgtggatggagttgtggccgttttctacactgtgctgacgccccttctcaaccctgttgtgtacaccctgaggaacaaggaggtgaagaaagctctgttgaagctgaaagacaaagtagcacattctcagagcaaatag

SEQ ID NO: 102 - protein, 311 aa, Homo Sapiens
MSNASLLTAFILMGLPHAPALDAPLFGVFLVVYVLTVLGNLLILLVIRVDSHLHTTMYYFLTNLSFIDMWFSTVTVPKLLMTLVFPSGRAISFHSCMAQLYFFHFLGGTECFLYRVMSCDRYLAISYPLRYTSMMTGRSCTLLATSTWLSGSLHSAVQAILTFHLPYCGPNWIQHYLCDAPPILKLACADTSAIETVIFVTVGIVASGCFVLIVLSYVSIVCSILRIRTSEGKHRAFQTCASHCIVVLCFFGPGLFIYLRPGSRKAVDGVVAVFYTVLTPLLNPVVYTLRNKEVKKALLKLKDKVAHSQSK

SEQ ID NO: 103 - DNA, 918 bp, Homo Sapiens
  CDS (1)..(912)
atgcagaggagcaatcatacagtgactgagtttatactgctgggcttcaccacagacccaggaatgcagctgggcctcttcgtggtgttcctgggcgtgtactctctcactgtggtaggaaatagcaccctcatcgtgttgatctgtaatgactcctgcctccacacacccatgtattttttcactggaaatctgtcgtttctggatctctggtattcttctgtctacaccccaaagatcctagtgacctgcatctctgaagacaaaagcatctcctttgctggctgcctgtgtcagttcttcttctctgcagggctggcctatagtgagtgctacctgctggctgccgtggcttatgaccgctacgtggccatctccaagcccctgctttatgcccaggccatgtccataaagctgtgtgcattgctggtagcagtctcatattgtggtggctttattaactcttcaatcatcaccaagaaaacgttttcctttaacttctgccgtgaaaacatcattgatgactttttctgtgatttgcttcccttggtggagctggcctgtggcgagaagggcggctataaaattatgatgtacttcctgctggcctccaatgtcatctgccccgcagtgctcatcctggcctcctacctctttatcatcaccagtgtcttgaggatctcctcctccaagggctacctcaaagccttctccacatgctcctcccacctgacctctgtcactttatactatggctccattctctacatctacgctctccccagatctagctattcttttgatatggacaaaatagtttctacattttacactgtggtattccccatgttgaatctcatgatctacagcctaaggaataaggatgtgaaagaggctctgaaaaaacttctcccataa

SEQ ID NO: 104 - protein, 304 aa, Homo Sapiens
MQRSNHTVTEFILLGFTTDPGMQLGLFVVFLGVYSLTVVGNSTLIVLICNDSCLHTPMYFFTGNLSFLDLWYSSVYTPKILVTCISEDKSISFAGCLCQFFFSAGLAYSECYLLAAVAYDRYVAISKPLLYAQAMSIKLCALLVAVSYCGGFINSSIITKKTFSFNFCRENIIDDFFCDLLPLVELACGEKGGYKIMMYFLLASNVICPAVLILASYLFIITSVLRISSSKGYLKAFSTCSSHLTSVTLYYGSILYIYALPRSSYSFDMDKIVSTFYTVVFPMLNLMIYSLRNKDVKEALKKLL

SEQ ID NO: 105 - DNA, 1038 bp, Homo Sapiens
  CDS (1)..(1035)
atgccgatgcagctgctgcttacagattttattatcttttccatcagattcatcatcaacagcatggaagcgagaaaccaaacagctatttcaaaattccttctcctgggactgatagaggatccggaactgcagcccgtccttttcagcctgttcctgtccatgtacttggtcaccatcctggggaacctgctcatcctcttggctgtcatctctgactctcacctccacacccccatgtacttcttcctctccaatctctcctttttggacatttgtttaagcacaaccacgatcccaaagatgctggtgaacatccaagctcagaatcggagcatcacgtactcaggctgcctcacccagatctgctttgtcttgttttttgctggcttggaaaattgtctccttgcagcaatggcctatgaccgctatgtggccatttgtcacccccttagatacacagtcatcatgaacccccgcctctgtggcctgctgattcttctctctctgttgactagtgttgtgaatgcccttcttctcagcctgatggtgttgaggctgtccttctgcacagacctggaaatcccgctcttcttctgtgaactggctcaggtcatccaactcacctgttcagacaccctcatcaataacatcctgatatattttgcagcttgcatatttggtggtgttcctctgtctggaatcattttgtcttacactcagatcacctcctgtgttttgagaatgccatcagcaagtggaaagcacaaagcagtttccacctgtgggtctcacctctccattgttctcttgttctatggggcaggtttgggggtgtacattagttctgtggttactgactcacctaggaagactgcagtggcttcagtgatgtattctgtgttccctcaaatggtgaacccctttatctatagtctgaggaataaggacatgaaaggaaccttgaggaagttcatagggaggataccttctcttctgtggtgtgccatttgctttggattcaggtttctagagtaa

SEQ ID NO: 106 - protein, 345 aa, Homo Sapiens
MPMQLLLTDFIIFSIRFIINSMEARNQTAISKFLLLGLIEDPELQPVLFSLFLSMYLVTILGNLLILLAVISDSHLHTPMYFFLSNLSFLDICLSTTTIPKMLVNIQAQNRSITYSGCLTQICFVLFFAGLENCLLAAMAYDRYVAICHPLRYTVIMNPRLCGLLILLSLLTSVVNALLLSLMVLRLSFCTDLEIPLFFCELAQVIQLTCSDTLINNILIYFAACIFGGVPLSGIILSYTQITSCVLRMPSASGKHKAVSTCGSHLSIVLLFYGAGLGVYISSVVTDSPRKTAVASVMYSVFPQMVNPFIYSLRNKDMKGTLRKFIGRIPSLLWCAICFGFRFLE

SEQ ID NO: 107 - DNA, 942 bp, Homo Sapiens
  CDS (1)..(939)
atgctgctgactgatagaaatacaagtgggaccacgttcaccctcttgggcttctcagattacccagaactgcaagtcccactcttcctggtttttctggccatctacaatgtcactgtgctagggaatattgggttgattgtgatcatcaaaatcaaccccaaactgcatacccccatgtactttttcctcagccaactctcctttgtggatttctgctattcctccatcattgctcccaagatgttggtgaaccttgttgtcaaagacagaaccatttcatttttaggatgcgtagtacaattctttttcttctgtacctttgtggtcactgaatcctttttattagctgtgatggcctatgaccgcttcgtggccatttgcaaccctctgctctacacagttaacatgtcccagaaactctgcgtgctgctggttgtgggatcctatgcctggggagtctcatgttccttggaactgacgtgctctgctttaaagttatgttttcatggtttcaacacaatcaatcacttcttctgtgagttctcctcactactctccctttcttgctctgatacttacatcaaccagtggctgctattctttcttgccacctttaatgaaatcagcacactactcatcgttctcacatcttatgcgttcattgttgtaaccatcctcaagatgcgttcagtcagtgggcgccgcaaagccttctccacctgtgcctcccacctgactgccatcaccatcttccatggcaccatcctcttcctttactgtgtgcccaactccaaaaactccaggcacacagtcaaagtggcctctgtgttttacaccgtggtgatccccatgttgaatcccctgatctacagtctgagaaataaagatgtcaaggatacagtcaccgagatactggacaccaaagtcttctcttactga

SEQ ID NO: 108 - protein, 313 aa, Homo Sapiens
MLLTDRNTSGTTFTLLGFSDYPELQVPLFLVFLAIYNVTVLGNIGLIVIIKINPKLHTPMYFFLSQLSFVDFCYSSIIAPKMLVNLVVKDRTISFLGCVVQFFFFCTFVVTESFLLAVMAYDRFVAICNPLLYTVNMSQKLCVLLVVGSYAWGVSCSLELTCSALKLCFHGFNTINHFFCEFSSLLSLSCSDTYINQWLLFFLATFNEISTLLIVLTSYAFIVVTILKMRSVSGRRKAFSTCASHLTAITIFHGTILFLYCVPNSKNSRHTVKVASVFYTVVIPMLNPLIYSLRNKDVKDTVTEILDTKVFSY

SEQ ID NO: 109 - DNA, 987 bp, Homo Sapiens
  CDS (1)..(984)
atgtttctgacagagagaaatacgacatctgaggccacattcactctcttgggcttctcagattacctggaactgcaaattcccctcttctttgtatttctggcagtctacggcttcagtgtggtagggaatcttgggatgatagtgatcatcaaaattaacccaaaattgcatacccccatgtattttttcctcaaccacctctcctttgtggatttctgctattcctccatcattgctcccatgatgctggtgaacctggttgtagaagatagaaccatttcattctcaggatgtttggtgcaattctttttcttttgcacctttgtagtgactgaattaattctatttgcggtgatggcctatgaccactttgtggccatttgcaatcctctgctctacacagttgccatctcccagaaactctgtgccatgctggtggttgtattgtatgcatggggagtcgcatgttccctgacactcgcgtgctctgctttaaagttatcttttcatggtttcaacacaatcaatcatttcttctgtgagttatcctccctgatatcactctcttaccctgactcttatctcagccagttgcttcttttcactgttgccacttttaatgagataagcacactactcatcattctgacatcttatgcattcatcattgtcaccaccttgaagatgccttcagccagtgggcaccgcaaagtcttctccacctgtgcctcccacctgactgccatcaccatcttccatggcaccatcctcttcctctactgtgtacccaactccaaaaactccaggcacacagtcaaagtggcctctgtgttttacaccgtggtgatccccttgttgaatcccctgatctacagtctgagaaataaagatgttaaggatgcaatccgaaaaataatcaatacaaaatattttcatattaaacataggcattggtatccatttaattttgttattgaacaataa

SEQ ID NO: 110 - protein, 328 aa, Homo Sapiens
MFLTERNTTSEATFTLLGFSDYLELQIPLFFVFLAVYGFSVVGNLGMIVIIKINPKLHTPMYFFLNHLSFVDFCYSSIIAPMMLVNLVVEDRTISFSGCLVQFFFFCTFVVTELILFAVMAYDHFVAICNPLLYTVAISQKLCAMLVVVLYAWGVACSLTLACSALKLSFHGFNTINHFFCELSSLISLSYPDSYLSQLLLFTVATFNEISTLLIILTSYAFIIVTTLKMPSASGHRKVFSTCASHLTAITIFHGTILFLYCVPNSKNSRHTVKVASVFYTVVIPLLNPLIYSLRNKDVKDAIRKIINTKYFHIKHRHWYPFNFVIEQ

SEQ ID NO: 111 - DNA, 945 bp, Homo Sapiens
  CDS (1)..(942)
atgatgatggttttaaggaatctgagcatggagcccacctttgcccttttaggtttcacagattacccaaagcttcagattcctctcttccttgtgtttctgctcatgtatgttatcacagtggtaggaaaccttgggatgatcataataatcaagattaaccccaaatttcacactcctatgtactttttccttagtcacctctcttttgttgatttttgttactcttccattgtcactcccaagctgcttgagaacttggtaatggcagataaaagcatcttctactttagctgcatgatgcagtacttcctgtcctgcactgctgtggtgacagagtctttcttgctggcagtgatggcctatgaccgctttgtggccatctgcaatcctctgctttatacagtggccatgtcacagaggctctgtgccctgctggtggctgggtcatatctctggggcatgtttggccccttggtactcctttgttatgctctccggttaaacttctctggacctaatgtaatcaaccacttcttttgtgagtatactgctctcatctctgtgtctggctctgatatactcatcccccacctgctgcttttcagcttcgccaccttcaatgagatgtgtacactactgatcatcctcacttcctatgttttcatttttgtgactgtactaaaaatccgttctgttagtgggcgccacaaagccttctccacctgggcctcccacctgacttctatcaccatcttccatgggaccatccttttcctttactgtgtacccaactccaaaaactctcggcaaacagtcaaagtggcctctgtattttacacagttgtcaaccccatgctgaaccctctgatctacagcctaaggaataaagacgtgaaggatgctttctggaagttaatacatacacaagttccatttcactga

SEQ ID NO: 112 - protein, 314 aa, Homo Sapiens
MMMVLRNLSMEPTFALLGFTDYPKLQIPLFLVFLLMYVITVVGNLGMIIIIKINPKFHTPMYFFLSHLSFVDFCYSSIVTPKLLENLVMADKSIFYFSCMMQYFLSCTAVVTESFLLAVMAYDRFVAICNPLLYTVAMSQRLCALLVAGSYLWGMFGPLVLLCYALRLNFSGPNVINHFFCEYTALISVSGSDILIPHLLLFSFATFNEMCTLLIILTSYVFIFVTVLKIRSVSGRHKAFSTWASHLTSITIFHGTILFLYCVPNSKNSRQTVKVASVFYTVVNPMLNPLIYSLRNKDVKDAFWKLIHTQVPFH

SEQ ID NO: 113 - DNA, 975 bp, Homo Sapiens
  CDS (1)..(972)
atgttggagagtaattacaccatgccaactgagttcctatttgttggattcacagattatctacctctcagagtcacactgttcttggtattccttctggtatatacattaactatggtcggaaatatactcttaataattctagttaatattaattcaagccttcaaattcccatgtattattttcttagcaacttatctttcttagacatcagctgttctacagcaatcactcctaaaatgctggcaaacttcttggcatccaggaaaagcatctctccttatgggtgtgcactacaaatgtttttcttcgcttcttttgctgatgctgagtgccttatcctggcagcaatggcttatgaccgctatgcagccatctgcaacccactgctctatactacactgatgtctaggagagtctgtgtctgcttcattgtgttggcatatttcagtggaagtacaacatcactggtccatgtgtgcctcacattcaggctgtcattttgtggctccaatatcgtcaatcattttttctgtgatatcccacctcttctggctttatcatgtacagacactcagatcaaccagcttctgctctttgctttgtgcagcttcatccagaccagcacttttgtggtaatatttatttcttacttctgcatcctcatcactgtgttgagcatcaagtcctcaggtggcagaagcaaaacattctccacttgtgcttcccacctcatagcagtcaccttattctatggagcgctcctgtttatgtacttacagcccaccactagctattccctagacactgataaggtggtggcagtgttttatactgttgtatttcccatgtttaatccaataatttatagtttcagaaacaaggatgtgaaaaatgctctcaaaaagctattagaaagaattggatattcaaatgaatggtatttaaatcgtttaagaatagtcaatatctaa

SEQ ID NO: 114 - protein, 324 aa, Homo Sapiens
MLESNYTMPTEFLFVGFTDYLPLRVTLFLVFLLVYTLTMVGNILLIILVNINSSLQIPMYYFLSNLSFLDISCSTAITPKMLANFLASRKSISPYGCALQMFFFASFADAECLILAAMAYDRYAAICNPLLYTTLMSRRVCVCFIVLAYFSGSTTSLVHVCLTFRLSFCGSNIVNHFFCDIPPLLALSCTDTQINQLLLFALCSFIQTSTFVVIFISYFCILITVLSIKSSGGRSKTFSTCASHLIAVTLFYGALLFMYLQPTTSYSLDTDKVVAVFYTVVFPMFNPIIYSFRNKDVKNALKKLLERIGYSNEWYLNRLRIVNI

SEQ ID NO: 115 - DNA, 948 bp, Homo Sapiens
  CDS (1)..(945)
atggctcctgaaaatttcaccagggtcactgagtttattctcacaggtgtctctagctgtccagagctccagattcccctcttcctggtcttcctagtgctctatgtgctgaccatggcagggaacctgggcatcatcaccctcaccagtgttgactctcgacttcaaacccccatgtactttttcctgagacatctagctatcatcaatcttggcaactctactgtcattgcccctaaaatgctgatgaactttttagtaaagaagaaaactacctcattctatgaatgtgccacccaactgggagggttcttgttctttattgtatcggaggtaatgatgctggctgtgatggcctatgaccgctatgtggccatttgtaaccctctgctctacatggtggtggtgtctcggcggctctgcctcctgctggtgtccctcacgtacctctatggcttttctacagctattgtggtttcaccttgtatattctctgtgtcttattgctcttctaatataatcaatcatttttactgtgatattgcacctctgttagcattatcttgctctgatacttacataccagaaacaatagtctttatatctgcagcaacaaatttgtttttttccatgattacagttctagtatcttatttcaatattgttttgtccattctaaggatacgttcaccagaaggaaggaaaaaagccttttccacctgcgcttcgcatatgatagcagtcacggttttctatgggacaatgctatttatgtatttgcagccccaaaccaaccactcactggatactgataagatggcttctgtgttttacacattggtgattcctatgctgaatcccttgatctacagcctgaggaataatgatgtaaatgttgccttaaagaaattcatggaaaatccatgttactcctttaaatcaatgtaa

SEQ ID NO: 116 - protein, 315 aa, Homo Sapiens [sequence omitted]

SEQ ID NO: 117 - DNA, 936 bp, Homo Sapiens
  CDS (1)..(933)
atgactgggggaggaaatattacagaaatcacctatttcatcctgctgggattctcagattttcccaggatcataaaagtgctcttcactatattcctggtgatctacattacatctctggcctggaacctctccctcattgttttaataaggatggattcccacctccatacacccatgtatttcttcctcagtaacctgtccttcatagatgtctgctatatcagctccacagtccccaagatgctctccaacctcttacaggaacagcaaactatcacttttgttggttgtattattcagtactttatcttttcaacgatgggactgagtgagtcttgtctcatgacagccatggcttatgatcgttatgctgccatttgtaaccccctgctctattcatccatcatgtcacccaccctctgtgtttggatggtactgggagcctacatgactggcctcactgcttctttattccaaattggtgctttgcttcaactccacttctgtgggtctaatgtcatcagacatttcttctgtgacatgccccaactgttaatcttgtcctgtactgacactttctttgtacaggtcatgactgctatattaaccatgttctttgggatagcaagtgccctagttatcatgatatcctatggctatattggcatctccatcatgaagatcacttcagctaaaggcaggtccaaggcattcaacacctgtgcttctcatctaacagctgtttccctcttctatacatcaggaatctttgtctatttgagttccagctctggaggttcttcaagctttgacagatttgcatctgttttctacactgtggtcattcccatgttaaatcccttgatttacagtttgaggaacaaagaaattaaagatgccttaaagaggttgcaaaagagaaagtgctgctga

SEQ ID NO: 118 - protein, 311 aa, Homo Sapiens
MTGGGNITEITYFILLGFSDFPRIIKVLFTIFLVIYITSLAWNLSLIVLIRMDSHLHTPMYFFLSNLSFIDVCYISSTVPKMLSNLLQEQQTITFVGCIIQYFIFSTMGLSESCLMTAMAYDRYAAICNPLLYSSIMSPTLCVWMVLGAYMTGLTASLFQIGALLQLHFCGSNVIRHFFCDMPQLLILSCTDTFFVQVMTAILTMFFGIASALVIMISYGYIGISIMKITSAKGRSKAFNTCASHLTAVSLFYTSGIFVYLSSSSGGSSSFDRFASVFYTVVIPMLNPLIYSLRNKEIKDALKRLQKRKCC

SEQ ID NO: 119 - DNA, 951 bp, Homo Sapiens
  CDS (1)..(948)
atggagaatgtcactacaatgaatgagtttcttctacttggcctgactggtgttcaggagctgcagcctttcttctttgggattttcttaatcatttacctgataaacttgattggaaatggatctatattggtgatggttgttttggaaccacaactccactcccctatgtatttttttctgggaaacctttcttgtctggatatttcttattcttcagtgacactgcccaagctgctcgtaaacctcgtgtgcagtcgcagggctatatcttttctaggctgtatcacccagctacacttcttccactttttgggaagcacagaggccattttactggctatcatggcctttgaccgttttgttgccatctgcaatcctcttcgctacactgtcatcatgaacccccaggtgtgtattctgttggcagctgcggcctggctcatcagcttcttttacgctctgatgcattctgtcatgactgcacacctgagtttttgtggctctcagaaactcaatcacttcttctacgatgtcaagccgctcttagaattggcctgtagtgacacattactcaatcaatggcttctttccattgtcacaggcagcatatccatgggagctttctttctgactcttctctcctgcttctatgtaattggcttccttctgtttaagaacaggtcctgcagaatactccacaaggctctgtccacttgtgcctcccattttatggtggtatgtcttttctatggacctgtgggcttcacatatattcgtcctgcttcagccacctccatgattcaggaccggataatggccatcatgtatagcgccgtcacccctgtactgaatccactaatctacacccttaggaacaaagaagtgatgatggctctgaagaaaatctttggtaggaagttgtttaaagactggcagcaacaccactag

SEQ ID NO: 120 - protein, 316 aa, Homo Sapiens
MENVTTMNEFLLLGLTGVQELQPFFFGIFLIIYLINLIGNGSILVMVVLEPQLHSPMYFFLGNLSCLDISYSSVTLPKLLVNLVCSRRAISFLGCITQLHFFHFLGSTEAILLAIMAFDRFVAICNPLRYTVIMNPQVCILLAAAAWLISFFYALMHSVMTAHLSFCGSQKLNHFFYDVKPLLELACSDTLLNQWLLSIVTGSISMGAFFLTLLSCFYVIGFLLFKNRSCRILHKALSTCASHFMVVCLFYGPVGFTYIRPASATSMIQDRIMAIMYSAVTPVLNPLIYTLRNKEVMMALKKIFGRKLFKDWQQHH

SEQ ID NO: 121 - DNA, 951 bp, Homo Sapiens
  CDS (1)..(948)
atggaggctgccaatgagtcttcagagggaatctcattcgttttattgggactgacaacaagtcctggacagcagcggcctctctttgtgctgttcttgctcttgtatgtggccagcctcctgggtaatggactcattgtggctgccatccaggccagtccagcccttcatgcacccatgtacttcctgctggcccacctgtcctttgctgacctctgtttcgcctccgtcactgtgcccaagatgttggccaacttgttggcccatgaccactccatctcgctggctggctgcctgacccaaatgtacttcttctttgccctgggggtaactgatagctgtcttctggcggccatggcctatgactgctacgtggccatccggcaccccctcccctatgccacgaggatgtcccgggccatgtgcgcagccctggtgggaatggcatggctggtgtcccacgtccactccctcctgtatatcctgctcatggctcgcttgtccttctgtgcttcccaccaagtgccccacttcttctgtgaccaccagcctctcttaaggctctcgtgctctgacacccaccacatccagctgctcatcttcaccgagggcgccgcagtggtggtcactcccttcctgctcatcctcgcctcctatggggccatcgcagctgccgtgctccagctgccctcagcctctgggaggctccgggctgtgtccacctgtggctcccacctggctgtggtgagcctcttctatgggacagtcattgcagtctacttccaggccacatcccgacgcgaggcagagtggggccgtgtggccactgtcatgtacactgtagtcacccccatgctgaaccccatcatctacagcctctggaatcgcgatgtacagggggcactccgagcccttctcattgggcgaaggatctcagctagtgactcctga

SEQ ID NO: 122 - protein, 316 aa, Homo Sapiens
MEAANESSEGISFVLLGLTTSPGQQRPLFVLFLLLYVASLLGNGLIVAAIQASPALHAPMYFLLAHLSFADLCFASVTVPKMLANLLAHDHSISLAGCLTQMYFFFALGVTDSCLLAAMAYDCYVAIRHPLPYATRMSRAMCAALVGMAWLVSHVHSLLYILLMARLSFCASHQVPHFFCDHQPLLRLSCSDTHHIQLLIFTEGAAVVVTPFLLILASYGAIAAAVLQLPSASGRLRAVSTCGSHLAVVSLFYGTVIAVYFQATSRREAEWGRVATVMYTVVTPMLNPIIYSLWNRDVQGALRALLIGRRISASDS

SEQ ID NO: 123 - DNA, 954 bp, Homo Sapiens
  CDS (1)..(951)
atgagaaatttgagtggaggccatgtcgaggagtttgtcttggtgggtttccctaccacgcctcccctccagctgctcctctttgtccttttttttgcaatttaccttctgacattgttggagaatgcacttattgtcttcacaatatggcttgctccaagccttcatcgtcccatgtactttttccttggccatctctctttcctggagctatggtacatcaatgtcaccattcctcggctcttggcagcctttcttacccaggatggtagagtctcctacgtaggttgcatgacccaactgtacttctttattgccttagcctgtactgaatgtgtgctgttggcagttatggcctatgatcgctacctggccatctgtggacccctcctttaccctagtctcatgccttccagtctggccactcgccttgctgctgcctcttggggcagtggcttcttcagctccatgatgaagcttctttttatttcccaattgtcctactgtggacccaacattatcaaccactttttctgtgatatttccccactactcaacctcacctgctctgacaaggagcaagcagagctagtagacttccttctggccctggtgatgattctactccctctattggctgtggtttcatcatacactgccatcattgcagccatcctgaggatccctacgtccaggggacgccacaaagccttttccacttgtgccgctcatctggcagtggttgttatctactactcctccactctcttcacctatgcacggccccgggccatgtacaccttcaaccacaacaagattatctctgtgctctacactatcattgtaccattcttcaacccagccatctactgcctgaggaacaaggaggtgaaggaggccttcaggaagacagtgatgggcagatgtcactatcctagggatgttcaggactga

SEQ ID NO: 124 - protein, 317 aa, Homo Sapiens
MRNLSGGHVEEFVLVGFPTTPPLQLLLFVLFFAIYLLTLLENALIVFTIWLAPSLHRPMYFFLGHLSFLELWYINVTIPRLLAAFLTQDGRVSYVGCMTQLYFFIALACTECVLLAVMAYDRYLAICGPLLYPSLMPSSLATRLAAASWGSGFFSSMMKLLFISQLSYCGPNIINHFFCDISPLLNLTCSDKEQAELVDFLLALVMILLPLLAVVSSYTAIIAAILRIPTSRGRHKAFSTCAAHLAVVVIYYSSTLFTYARPRAMYTFNHNKIISVLYTIIVPFFNPAIYCLRNKEVKEAFRKTVMGRCHYPRDVQD

SEQ ID NO: 125 - DNA, 930 bp, Homo Sapiens
  CDS (1)..(927)
atgaagatcaaccagacaatcctgaaggaattcattcttgttggcttttctgtgtacccacatgtacagacatttctttttgtggtcttcttttgtctctaccttctcacccttgcaggtaatctgatcatcatgggtctaacttgggtggacaggtccctccacacccctatgtatctcttccttagtgcactctccttctctgagacctgctatacgctgaccatcgtccccaagatgctggaagatctactggccaaggacagaagcatttcagtcacaggttgtagcttacagatgtgcttcttcttgggacttggtggcacaaactgtatcattctcactttgatgggatatgaccgcttcctggccatctgtaaccctctaagatatccactgcttatgaccaacattgtatgtggacaacttgtggcctctgcttgcactgcaggcttctttatctctcttacagagactgcactgatattcagggactctttctgcagacccaaccttgtcaaacacttcttctgccatatgctggcagttattaggctgtcttgtatagacagtaaccacacagaattcattataacactgatctcagtgtctggtttgctgggtacccttctgctcatcatcctgactgatgtcttcattatttctactgtcctcaggatcccttcagctgagggcaagcagaaggccttcaccacctgtgcctcccacctcaccgtggttataatccactttggttttgcatctattgtttatttgaagccagaagcctcaggagatgacacactcatagcagtcccttatactgtcattacccccttcctcagccccatcatattcagcctgaggaataaggacatgaaaaatgcttttagaagaatgatgggaaacacagttgccttgaaaaaataa

SEQ ID NO: 126 - protein, 309 aa, Homo Sapiens
MKINQTILKEFILVGFSVYPHVQTFLFVVFFCLYLLTLAGNLIIMGLTWVDRSLHTPMYLFLSALSFSETCYTLTIVPKMLEDLLAKDRSISVTGCSLQMCFFLGLGGTNCIILTLMGYDRFLAICNPLRYPLLMTNIVCGQLVASACTAGFFISLTETALIFRDSFCRPNLVKHFFCHMLAVIRLSCIDSNHTEFIITLISVSGLLGTLLLIILTDVFIISTVLRIPSAEGKQKAFTTCASHLTVVIIHFGFASIVYLKPEASGDDTLIAVPYTVITPFLSPIIFSLRNKDMKNAFRRMMGNTVALKK

SEQ ID NO: 127 - DNA, 969 bp, Homo Sapiens
  CDS (1)..(963)
atggagccccaaaatacctccactgtgactaactttcagctgttaggattccagaaccttcttgaatggcaggccctgctctttgtcattttcctgctcatctactgcctgaccattatagggaatgttgtcatcatcaccgtggtgagccagggcctgcgactgcactcccctatgtacatgttcctccagcatctctcctttctggaggtctggtacacgtccaccactgtgccccttctcctagccaacctgctgtcctggggccaagccatctccttctctgcctgcatggcacagctctacttcttcgtattcctcggcgccaccgagtgctttctcctggccttcatggcctatgaccgttacctggccatctgcagcccactccgctacccctttctcatgcatcgtgggctatgtgccaggttggtggtggtctcatggtgcacaggggtcagcacaggctttctgcattccatgatgatttccaggttggacttctgtgggcgcaatcagattaaccatttcttctgcgacctcccgccactcatgcagctctcctgttccagagtttatatcaccgaggtgaccatcttcatcctgtcaattgccgtgctgtgcatttgtttttttctgacactggggccctatgttttcattgtgtcctccatattgagaatcccttccacctctggccggagaaagaccttttccacatgtggctcccacctggctgttgtcactctctactacgggaccatgatctccatgtatgtgtgtcccagtccccacctgttgcctgaaatcaacaagatcatttctgtcttctacactgtggtcacaccactgctgaacccagttatctacagcttgaggaacaaagacttcaaagaagctgttagaaaggtcatgagaaggaaatgtggtattctatggagtacaagtaaaaggaagttcctttattag

SEQ ID NO: 128 - protein, 321 aa, Homo Sapiens
MEPQNTSTVTNFQLLGFQNLLEWQALLFVIFLLIYCLTIIGNVVIITVVSQGLRLHSPMYMFLQHLSFLEVWYTSTTVPLLLANLLSWGQAISFSACMAQLYFFVFLGATECFLLAFMAYDRYLAICSPLRYPFLMHRGLCARLVVVSWCTGVSTGFLHSMMISRLDFCGRNQINHFFCDLPPLMQLSCSRVYITEVTIFILSIAVLCICFFLTLGPYVFIVSSILRIPSTSGRRKTFSTCGSHLAVVTLYYGTMISMYVCPSPHLLPEINKIISVFYTVVTPLLNPVIYSLRNKDFKEAVRKVMRRKCGILWSTSKRKFL

SEQ ID NO: 129 - DNA, 870 bp, Homo Sapiens
  CDS (1)..(867)
atggaaaatgggagctatacctcttatttcattctcctaggactctttaaccacaccagagcccaccaagtcctcttcatgatggttctgagtatcgttttgacctccctgtttggcaattccctcatgattctcctgattcactgggaccaccggttccacacgcccatgtacttcctcctgagccaactttccctcatggacgtgatgctggtttccaccactgtgcccaaaatggcggctgactacttgaccggaagtaaggccatctcccgcgctggctgtggtgcgcagatcttcttcctccccacactgggtggtggagagtgcttcctcttagcagccatggcctatgaccgctatgcggctgtctgccacccactccgatatcccactctcatgagctggcagctgtgcctgaggatgaacctgtcgtgttggctcctgggtgcagctgacgggctcctgcaggctgttgctaccctgagcttcccatattgcggtgcacacgagatcgatcacttcttctgcgagacccccgtgctggtgcgtttggcttgtgctgacacttcagtcttcgaaaacgccatgtacatctgctgtgtgttaatgctcctggtccccttttccctcatcctgtcctcctatggtctcatcctcgctgctgttctgcacatgcgctctacagaagcccgcaagaaggcctttgccacctgctcttcacatgtggctgtggtgggactcttttatggagctgccatttttacctatatgagacccaaatcccacaggtccactaaccacgacaaggttgtgtcagccttctatactatgttcacccctttactaaaccccctcatctacagtgtg

SEQ ID NO: 130 - protein, 289 aa, Homo Sapiens
MENGSYTSYFILLGLFNHTRAHQVLFMMVLSIVLTSLFGNSLMILLIHWDHRFHTPMYFLLSQLSLMDVMLVSTTVPKMAADYLTGSKAISRAGCGAQIFFLPTLGGGECFLLAAMAYDRYAAVCHPLRYPTLMSWQLCLRMNLSCWLLGAADGLLQAVATLSFPYCGAHEIDHFFCETPVLVRLACADTSVFENAMYICCVLMLLVPFSLILSSYGLILAAVLHMRSTEARKKAFATCSSHVAVVGLFYGAAIFTYMRPKSHRSTNHDKVVSAFYTMFTPLLNPLIYS

SEQ ID NO: 131 - DNA, 963 bp, Homo Sapiens
  CDS (1)..(960)
atggaaaggaccaacgattccacgtcgacagaatttttcctggtagggctttctgcccacccaaagctccagacagttttcttcgttctaattttgtggatgtacctgatgatcctgcttggaaatggagtccttatctcagttatcatctttgattctcacctgcacacccccatgtatttcttcctctgtaatctttccttcctcgacgtttgctacacaagttcctctgtcccactaattcttgccagctttctggcagtaaagaaaaaggtttccttctctgggtgtatggtgcaaatgtttatttcttttgccatgggggccacggagtgcatgatcttaggcacgatggcactggaccgctatgtggccatctgctacccactgagataccctgtcatcatgagcaagggtgcctatgtggccatggcagctgggtcctgggtcactgggcttgtggactcagtagtgcagacagcttttgcaatgcagttaccattctgtgctaataatgtcattaaacattttgtctgtgaaattctggctatcttgaaactggcctgtgctgatatttcaatcaatgtgattagtatgacagggtcgaatctgattgttctggttattccattgttagtaatttccatctcttacatatttattgttgccactattctgaggattccttccactgaaggaaaacataaggccttctccacctgctcagcccacctgacagtggtgattatattctatggaaccatcttcttcatgtacgcaaagcctgagtctaaagcctctgttgattcaggtaatgaagacatcattgaggccctcatctcccttttctatggagtgatgactcccatgcttaatcctctcatctatagtctgcgaaacaaggatgtaaaggctgctgtcaaaaacatactgtgtaggaaaaacttttctgatggaaaatga

SEQ ID NO: 132 - protein, 320 aa, Homo Sapiens
MERTNDSTSTEFFLVGLSAHPKLQTVFFVLILWMYLMILLGNGVLISVIIFDSHLHTPMYFFLCNLSFLDVCYTSSSVPLILASFLAVKKKVSFSGCMVQMFISFAMGATECMILGTMALDRYVAICYPLRYPVIMSKGAYVAMAAGSWVTGLVDSVVQTAFAMQLPFCANNVIKHFVCEILAILKLACADISINVISMTGSNLIVLVIPLLVISISYIFIVATILRIPSTEGKHKAFSTCSAHLTVVIIFYGTIFFMYAKPESKASVDSGNEDIIEALISLFYGVMTPMLNPLIYSLRNKDVKAAVKNILCRKNFSDGK

SEQ ID NO: 133 - DNA, 933 bp, Homo Sapiens
  CDS (1)..(930)
aattacaatcaatcatcaactgatttcatcttattaggattcttcccaccatcaagaattggccttttcctcttcatcctcattgttttcattttcctaatggctctaattggaaacctatccatgattcttctcatcttcttggacacccatctccacacacccatgtatttcctacttagtcagctctccctcattgacctaaattacatctccaccattgttcctaagatggcatctgattttctgtctggtaacaagtctatctccttcactgggtgtgggattcagagtttcttcttctcggcattaggaggtgcagaagcactacttttggcatctatggcctatgatcgttacattgctatttgctttcctcttcactatcccatccgcatgagcaaaagaatgtgtgtgctgatgataacagggtcttggatcataggctcgatcaatgcttgtgctcacactgtatatgtactccatattccttattgccaatccagggccatcaatcatttcttctgtgatgtcccagcaatggtgactctggcctgcatggacacctgggtctatgagggcacagtgtttttgagcaccaccatctttctcgtgtttcccttcattgctatttcatgttcctatggccgggttctccttgctgtctaccacatgaaatctgcagaagggaggaagaaagcctacctgacctgcagcacccacctcactgtagtaactttctactatgcaccttttgtctacacttatctacgtccaagatccctgcgatctccaacagaggacaaggttctggctgtcttctacaccatcctcaccccaatgctcaaccccatcatctatagcctgaggaacaaggaggtgatgggggccctgacacgagtgagtcagagaatctgctctgtgaaaatgtag

SEQ ID NO: 134 - protein, 310 aa, Homo Sapiens
NYNQSSTDFILLGFFPPSRIGLFLFILIVFIFLMALIGNLSMILLIFLDTHLHTPMYFLLSQLSLIDLNYISTIVPKMASDFLSGNKSISFTGCGIQSFFFSALGGAEALLLASMAYDRYIAICFPLHYPIRMSKRMCVLMITGSWIIGSINACAHTVYVLHIPYCQSRAINHFFCDVPAMVTLACMDTWVYEGTVFLSTTIFLVFPFIAISCSYGRVLLAVYHMKSAEGRKKAYLTCSTHLTVVTFYYAPFVYTYLRPRSLRSPTEDKVLAVFYTILTPMLNPIIYSLRNKEVMGALTRVSQRICSVKM

SEQ ID NO: 135 - DNA, 954 bp, Homo Sapiens
  CDS (1)..(951)
atggggatggtgagacataccaatgagagcaacctagcaggtttcatccttttagggttttctgattatcctcagttacagaaggttctatttgtgctcatattgattctgtatttactaactattttggggaataccaccatcattctggtttctcgtctggaacccaagcttcatatgccgatgtatttcttcctttctcatctctccttcctgtaccgctgcttcaccagcagtgttattccccagctcctggtaaacctgtgggaacccatgaaaactatcgcctatggtggctgtttggttcacctttacaactcccatgccctgggatccactgagtgcgtcctcccggctctgatgtcctgtgaccgctatgtggctgtctgccgtcctctccattacactgtcttaatgcatatccatctctgcatggccttggcatctatggcatggctcagtggaatagccaccaccctggtacagtccaccctcaccctgcagctgcccttctgtgggcatcgccaagtggatcatttcatctgcgaggtccctgtgctcatcaagctggcttgtgtgggcaccacgtttaacgaggctgagctttttgtggctagtatccttttccttatagtgcctgtctcattcatcctggtctcctctggctacattgcccacgcagtgttgaggattaagtcagctaccaggagacagaaagcattcgggacctgcttctcccacctgacagtggtcaccatcttttatggaaccatcatcttcatgtatctgcagccagccaagagtagatccagggaccagggcaagtttgtttctctcttctacactgtggtaacccgcatgcttaaccctcttatttataccttgaggatcaaggaggtgaaaggggcattaaagaaagttctagcaaaggctctgggagtaaatattttatga

SEQ ID NO: 136 - protein, 317 aa, Homo Sapiens
MGMVRHTNESNLAGFILLGFSDYPQLQKVLFVLILILYLLTILGNTTIILVSRLEPKLHMPMYFFLSHLSFLYRCFTSSVIPQLLVNLWEPMKTIAYGGCLVHLYNSHALGSTECVLPALMSCDRYVAVCRPLHYTVLMHIHLCMALASMAWLSGIATTLVQSTLTLQLPFCGHRQVDHFICEVPVLIKLACVGTTFNEAELFVASILFLIVPVSFILVSSGYIAHAVLRIKSATRRQKAFGTCFSHLTVVTIFYGTIIFMYLQPAKSRSRDQGKFVSLFYTVVTRMLNPLIYTLRIKEVKGALKKVLAKALGVNIL

SEQ ID NO: 137 - DNA, 957 bp, Homo Sapiens
  CDS (1)..(954)
atggaagagtacaacacatcctctacagacttcactttcatggggctgttcaacagaaaggaaacctcaggtcttatttttgccatcatctctatcatcttcttcaccgcactgatggccaatggggttatgatcttcctgatccaaacagatttgcgccttcatacacccatgtacttcctcctcagccacctttccttaattgacatgatgtatatttccactattgtgcctaagatgctggttaattacctgctggatcaaaggaccatttcctttgtggggtgcacagctcaacacttcctctaccttacccttgtgggagctgaattcttcctgctgggcctcatggcctatgaccgctatgtggccatttgcaaccctctgagataccctgtcctcatgagccgccgggtctgttggatgattatagcaggttcctggtttgggggctctttggatggcttcctcctaacccccatcaccatgagctttcccttctgcaattcccgggagattaaccacttcttctgtgaggcaccagcagtcctgaagttggcatgtgcagacacagccctctacgagacagtgatgtatgtgtgctgtgttttgatgctgctgattcctttctctgtagtccttgcttcctatgcccgaatcctgactacagttcagtgcatgagctcagtggagggcaggaagaaggcatttgccacttgctcatcccacatgactgtggtgtccttgttctacggggctgccatgtacacctacatgctgccacattcttaccacaagccagcccaggacaaagtcctctctgtgttttacaccattctcacacccatgctgaaccccctcatctacagccttagaaacaaggatgtgactggagctctgaagagggccttggggaggttcaagggtcctcaaagggtgtcaggaggtgtcttttga

SEQ ID NO: 138 - protein, 318 aa, Homo Sapiens
MEEYNTSSTDFTFMGLFNRKETSGLIFAIISIIFFTALMANGVMIFLIQTDLRLHTPMYFLLSHLSLIDMMYISTIVPKMLVNYLLDQRTISFVGCTAQHFLYLTLVGAEFFLLGLMAYDRYVAICNPLRYPVLMSRRVCWMIIAGSWFGGSLDGFLLTPITMSFPFCNSREINHFFCEAPAVLKLACADTALYETVMYVCCVLMLLIPFSVVLASYARILTTVQCMSSVEGRKKAFATCSSHMTVVSLFYGAAMYTYMLPHSYHKPAQDKVLSVFYTILTPMLNPLIYSLRNKDVTGALKRALGRFKGPQRVSGGVF

SEQ ID NO: 139 - DNA, 975 bp, Homo Sapiens
  CDS (1)..(972)
atgggcatggagggtcttctccagaactccactaacttcgtcctcacaggcctcatcacccatcctgccttccccgggcttctctttgcaatagtcttctccatctttgtggtggctataacagccaacttggtcatgattctgctcatccacatggactcccgcctccacacacccatgtacttcttgctcagccagctctccatcatggataccatctacatctgtatcactgtccccaagatgctccaggacctcctgtccaaggacaagaccatttccttcctgggctgtgcagttcagatcttcctctacctgaccctgattggaggggaattcttcctgctgggtctcatggcctatgaccgctatgtggctgtgtgcaaccctctacggtaccctctcctcatgaaccgcagggtttgcttattcatggtggtcggctcctgggttggtggttccttggatgggttcatgctgactcctgtcactatgagtttccccttctgtagatcccgagagatcaatcactttttctgtgagatcccagccgtgctgaagttgtcttgcacagacacgtcactctatgagaccctgatgtatgcctgctgcgtgctgatgctgcttatccctctatctgtcatctctgtctcctacacgcacatcctcctgactgtccacaggatgaactctgctgagggccggcgcaaagcctttgctacgtgttcctcccacattatggtggtgagcgttttctacggggcagccttctacaccaacgtgctgccccactcctaccacactccagagaaagataaagtggtgtctgccttctacaccatcctcacccccatgctcaacccactcatctacagcttgaggaataaagatgtggctgcagctctgaggaaagtactagggagatgtggttcctcccagagcatcagggtggcgactgtgatcaggaagggctag

SEQ ID NO: 140 - protein, 324 aa, Homo Sapiens
MGMEGLLQNSTNFVLTGLITHPAFPGLLFAIVFSIFVVAITANLVMILLIHMDSRLHTPMYFLLSQLSIMDTIYICITVPKMLQDLLSKDKTISFLGCAVQIFLYLTLIGGEFFLLGLMAYDRYVAVCNPLRYPLLMNRRVCLFMVVGSWVGGSLDGFMLTPVTMSFPFCRSREINHFFCEIPAVLKLSCTDTSLYETLMYACCVLMLLIPLSVISVSYTHILLTVHRMNSAEGRRKAFATCSSHIMVVSVFYGAAFYTNVLPHSYHTPEKDKVVSAFYTILTPMLNPLIYSLRNKDVAAALRKVLGRCGSSQSIRVATVIRKG

SEQ ID NO: 141 - DNA, 940 bp, Homo Sapiens
  CDS (1)..(939)
atgtgctcagggaatcagacttctcagaatcaaacagcaagcactgatttcaccctcacgggactctttgctgagagcaagcatgctgccctcctctacaccgtgaccttccttcttttcttgatggccctcactgggaatgccctcctcatcctcctcatccactcagagccccgcctccacacccccatgtacttcttcatcagccagctcgcgctcatggatctcatgtacctatgcgtgactgtgcccaagatgcttgtgggccaggtcactggagatgataccatttccccgtcaggctgtgggatccagatgttcttctacctgaccctggctggagctgaggttttcctcctggctgccatggcctatgaccgatatgctgctgtttgcagacctctccattacccactgctgatgaaccagagggtgtgccagctcctggtgtcagcctgctgggttttgggaatggttgatggtttgttgctcacccccattaccatgagcttccccttttgccagtctaggaaaatcctgagttttttctgtgagactcctgccctgctgaagctctcctgctctgacgtctccctctataagacgctcatgtacctgtgctgcatcctcatgcttctcgcccccatcatggtcatctccagctcatacaccctcatcctgcatctcatccacaggatgaattctgccgccggccacaggaaggccttggccacctgctcctcccacatgatcatagtgctgctgctcttcggtgcttccttctacacctacatgctcccgagttcctaccacacagctgagcaggacatgatggtgtctgccttttacaccatcttcactcctgtgctgaaccccctcatttacagtctccgcaacaaagatgtcaccagggctatgaggagcatgatgcagtcaagaa

SEQ ID NO: 142 - protein, 313 aa, Homo Sapiens
MCSGNQTSQNQTASTDFTLTGLFAESKHAALLYTVTFLLFLMALTGNALLILLIHSEPRLHTPMYFFISQLALMDLMYLCVTVPKMLVGQVTGDDTISPSGCGIQMFFYLTLAGAEVFLLAAMAYDRYAAVCRPLHYPLLMNQRVCQLLVSACWVLGMVDGLLLTPITMSFPFCQSRKILSFFCETPALLKLSCSDVSLYKTLMYLCCILMLLAPIMVISSSYTLILHLIHRMNSAAGHRKALATCSSHMIIVLLLFGASFYTYMLPSSYHTAEQDMMVSAFYTIFTPVLNPLIYSLRNKDVTRAMRSMMQSR

SEQ ID NO: 143 - DNA, 975 bp, Homo Sapiens
  CDS (1)..(972)
atggagagccccaatcgaaccaccattcaggagtttatcttctccgctttcccttattcctgggttaagtctgttgtctgctttgttccactgctcttcatctatgctttcattgttgttggaaacctggtcatcatcacagtggtccagttgaatactcacctccacactcccatgtatacttttatcagtgctctttctttcctggagatttggtataccacagccacaatcccaaagatgctgtctagcctgcttagtgagaggagcatttccttcaatggttgtctcctgcagatgtatttcttccattccaccggcatctgtgaggtgtgtctcttgacagttatggcctttgaccactacctggccatatgcagccctcttcattatccctctatcatgacccccaagctatgtacccaactgactttaagttgctgtgtttgtggctttatcacaccccttcctgagattgcctggatctctacactgccattttgtggttcgaatcaccttgaacatatcttctgtgacttcctcccagtgctgcgtctggcctgcacagacacacgagccatcgtcatgattcaggtagtggatgtcattcatgcagtggagattattacagctgtgatgctcatcttcatgtcctacgatggtattgtggctgtaattctacgtattcattcagctggaggccgccgcacagcattttccacgtgtgtctctcacttcattgtcttttcgctcttctttggcagtgtgactctcatgtacctacgcttctctgccacctactctttgttctgggatatagccattgctctggcctttgcagttttgtctcccttcttcaaccccattatctatagcctgaggaataaagaaataaaagaagctataaaaaagcacataggtcaagctaagatatttttttccgtaagaccagggacctcaagtaagatattttag

SEQ ID NO: 144 - protein, 324 aa, Homo Sapiens
MESPNRTTIQEFIFSAFPYSWVKSVVCFVPLLFIYAFIVVGNLVIITVVQLNTHLHTPMYTFISALSFLEIWYTTATIPKMLSSLLSERSISFNGCLLQMYFFHSTGICEVCLLTVMAFDHYLAICSPLHYPSIMTPKLCTQLTLSCCVCGFITPLPEIAWISTLPFCGSNHLEHIFCDFLPVLRLACTDTRAIVMIQVVDVIHAVEIITAVMLIFMSYDGIVAVILRIHSAGGRRTAFSTCVSHFIVFSLFFGSVTLMYLRFSATYSLFWDIAIALAFAVLSPFFNPIIYSLRNKEIKEAIKKHIGQAKIFFSVRPGTSSKIF

SEQ ID NO: 145 - DNA, 954 bp, Homo Sapiens
  CDS (1)..(951)
atggatcaatacaaccattcaagcctggctgaatttgtgttccttggctttgccagtgtgggctatgtcaggggctggctttttgtcctgctgctattggcatacctgttcaccatctgtggtaacatgctcatcttctcagtcatccgactggatgcagctctgcacacacctatgtaccactttgtcagtgttctttccttcttggagttgtggtatacagctaccactatccctaagatgttgtctaatattctcagtgagaagaaaaccatttcttttgcaggatgcctccttcagacctacttcttccactccttgggagcgtctgaatgctaccttcttacagccatggcctatgatagatacctggccatttgtcggcccctccactaccctataattatgaccaccacactctgtgccaagatggctgctgcttgttggacttgtggcttcctgtgtcccatttctgaggtcatccttgcctcccagctcccattttgtgcttacaatgaaatccaacacattttctgtgactttccacctttgctgagcttggcctgcaaggacacatctgctaacattctggtggactttgccattaatgctttcataattcttatcactttcttctttatcatgatttcttatgcaaggatcattggggctgtgctgaagataaaaacagcatcaggaagaaagaaggccttttctacctgtgcctcacatcttgctgtggtcctcatcttctttgggagcatcatcttcatgtatgtgcggctaaagaagagctattccctgacccttgaccgaacacttgctatagtttactccgtactaacaccaatggtcaatccaattatctacagtcttcgtaacaaggaaatcattaaagctatcaagaggaccatcttccagaagggagataaagctagtcttgctcatctttga

SEQ ID NO: 146 - protein, 317 aa, Homo Sapiens
MDQYNHSSLAEFVFLGFASVGYVRGWLFVLLLLAYLFTICGNMLIFSVIRLDAALHTPMYHFVSVLSFLELWYTATTIPKMLSNILSEKKTISFAGCLLQTYFFHSLGASECYLLTAMAYDRYLAICRPLHYPIIMTTTLCAKMAAACWTCGFLCPISEVILASQLPFCAYNEIQHIFCDFPPLLSLACKDTSANILVDFAINAFIILITFFFIMISYARIIGAVLKIKTASGRKKAFSTCASHLAVVLIFFGSIIFMYVRLKKSYSLTLDRTLAIVYSVLTPMVNPIIYSLRNKEIIKAIKRTIFQKGDKASLAHL

SEQ ID NO: 147 - DNA, 975 bp, Homo Sapiens
  CDS (1)..(972)
atgaatgagacaaatcattctcgggtgacagaatttgtgttgctgggactgtctagttcaagggagctccaacctttcttgtttcttacattttcactactttatctagcaattctgttgggcaactttctcatcatcctcactgtgacctcagattcccgccttcacacccccatgtactttctgcttgcaaacctgtcatttatagacgtatgtgttgcctcttttgctacccctaaaatgattgcagactttctggttgagcgcaagactatttcttttgatgcctgcctggcccagattttctttgttcatctcttcactggcagtgaaatggtgctcctagtttccatggcctatgaccgttatgttgctatatgcaaacctctccactacatgacagtcatgagccgtcgtgtatgtgttgtgctcgtcctcatttcatggtttgtgggcttcatccatactaccagccagttggcattcactgttaatctgccattttgtggtcctaataaggtagacagttttttctgtgaccttcctctagtgaccaagttagcctgcatagacacttatgttgtcagcttactaatagttgcagatagtggctttctttctctgagttcctttctcctcttggttgtctcctacactgtaatacttgttacagttaggaatcgctcctctgcaagcatggcgaaggcccgctccacattgactgctcacatcactgtggtcactttattctttggaccatgcattttcatctatgtgtggcccttcagcagttactcagttgacaaagtccttgctgtattctacaccatcttcacgcttattttaaaccctgtaatctacacgctaagaaacaaagaagtgaaggcagctatgtcaaaactgaagagtcggtatctgaagcctagtcaggtttctgtagtcataagaaatgttcttttcctagaaacaaagtaa

SEQ ID NO: 148 - protein, 324 aa, Homo Sapiens
MNETNHSRVTEFVLLGLSSSRELQPFLFLTFSLLYLAILLGNFLIILTVTSDSRLHTPMYFLLANLSFIDVCVASFATPKMIADFLVERKTISFDACLAQIFFVHLFTGSEMVLLVSMAYDRYVAICKPLHYMTVMSRRVCVVLVLISWFVGFIHTTSQLAFTVNLPFCGPNKVDSFFCDLPLVTKLACIDTYVVSLLIVADSGFLSLSSFLLLVVSYTVILVTVRNRSSASMAKARSTLTAHITVVTLFFGPCIFIYVWPFSSYSVDKVLAVFYTIFTLILNPVIYTLRNKEVKAAMSKLKSRYLKPSQVSVVIRNVLFLETK

SEQ ID NO: 149 - DNA, 927 bp, Homo Sapiens
  CDS (1)..(924)
atggccatggacaatgtcacagcagtgtttcagtttctccttattggcatttctaactatcctcaatggagagacacgtttttcacattagtgctgataatttacctcagcacattgttggggaatggatttatgatctttcttattcactttgaccccaacctccacactccaatctacttcttccttagtaacctgtctttcttagacctttgttatggaacagcttccatgccccaggctttggtgcattgtttctctacccatccctacctctcttatccccgatgtttggctcaaacgagtgtctccttggctttggccacagcagagtgcctcctactggctgccatggcctatgaccgtgtggttgctatcagcaatcccctgcgttattcagtggttatgaatggcccagtgtgtgtctgcttggttgctacctcatgggggacatcacttgtgctcactgccatgctcatcctatccctgaggcttcacttctgtggggctaatgtcatcaaccattttgcctgtgagattctctccctcattaagctgacctgttctgataccagcctcaatgaatttatgatcctcatcaccagtatcttcaccctgctgctaccatttgggtttgttctcctctcctacatacgaattgctatggctatcataaggattcgctcactccagggcaggctcaaggcctttaccacatgtggctctcacctgaccgtggtgacaatcttctatgggtcagccatctccatgtatatgaaaactcagtccaagtcctcccctgaccaggacaagtttatctcagtgttttatggagctttgacacccatgttgaaccccctgatatatagcctgagaaaaaaagatgttaaacgggcaataaggaaagttatgttgaaaaggacatga

SEQ ID NO: 150 - protein, 308 aa, Homo Sapiens [sequence omitted]

SEQ ID NO: 151 - DNA, 948 bp, Homo Sapiens
  CDS (1)..(945)
atgagacagaataacaatattacagaatttgtcctcctgggcttttctcaggatcctggtgtgcaaaaagcattatttgtcatgtttttactcacatacttggtgacagtggtggggaacctgctcattgtggtggatattattgccagcccttccttgggttccccaatgtatttcttccttgcctgcctgtcatttatagatgctgcatattccactaccatttctcccaagttaattgtaggcttattctgtgataaaaagactatttccttccaaggttgcatgggccagctatttatagaccatttctttggtggggctgaggtcttccttctggtggtgatggcctgtgatcgctatgtggccatctgtaagccactgcactatttgaccatcatgaatcgacaggtttgcttccttctgttggtggtggccatgattggaggttttgtacattctgcgtttcaaattgttgtgtacagtctccctatctgtggtcccaatgtcattgttcatttcagttgtgacatgcacccattactggaactggcatgcactgacacctactttataggcctcactgttgttgtcaatagtggagcaatctgtatggtcattttcaaccttctgttaatctcctatggagtcatcctaagctcccttaaaacttacagtcaggaaaagaggggtaaagccttgtctacctgcagctccggcagtaccgttgttgtcctcttttttgtaccctgtattttcatatatgttagacctgtttcaaactttcctactgataagttcatgactgtgttttataccattatcacacacatgctgagtcctttaatatatacgttgagaaattcagagatgagaaatgctatagaaaaactcttgggtaaaaagttaactatatttattataggaggagtgtccgtcctcatgtag

SEQ ID NO: 152 - protein, 315 aa, Homo Sapiens
MRQNNNITEFVLLGFSQDPGVQKALFVMFLLTYLVTVVGNLLIVVDIIASPSLGSPMYFFLACLSFIDAAYSTTISPKLIVGLFCDKKTISFQGCMGQLFIDHFFGGAEVFLLVVMACDRYVAICKPLHYLTIMNRQVCFLLLVVAMIGGFVHSAFQIVVYSLPICGPNVIVHFSCDMHPLLELACTDTYFIGLTVVVNSGAICMVIFNLLLISYGVILSSLKTYSQEKRGKALSTCSSGSTVVVLFFVPCIFIYVRPVSNFPTDKFMTVFYTIITHMLSPLIYTLRNSEMRNAIEKLLGKKLTIFIIGGVSVLM

SEQ ID NO: 153 - DNA, 1044 bp, Homo Sapiens
  CDS (1)..(1041)
atgggtaactggactgcagcggtgactgagtttgttctgctggggttttccctgagcagggaggtggagctgctgctcctggtgctcctgctgcccacgttcctgctgactcttctggggaacctgctcatcatctccactgtgctgtcctgctcccgcctccacacccccatgtacttcttcttgtgcaacctctctatcctggacatcctcttcacctcagtcatctctccaaaagtgttggccaacttaggatctagggataaaaccatctcctttgccggatgtatcacccagtgctatttctactttttcttgggcacagttgagttcctcctgctgacggtcatgtcctatgaccgttatgccaccatctgctgccccctgcggtacaccaccatcatgagaccttctgtctgcattgggaccgttgtattctcttgggtgggaggcttcctgtctgtgctctttccaaccatcctcatctcccagctgcccttctgtggctccaatatcattaaccacttcttctgtgacagtggacccttgctggccctggcctgtgcagacaccactgccatcgagctgatggattttatgctttcttccatggtcatcctctgctgcatagtcctcgtggcctattcctatacgtacatcatcttgaccatagtgcgcattccttctgcaagtggaaggaagaaggcctttaatacctgtgcttcccacctgaccatagtcatcattcctagtggcatcactgtgtttatctatgtgactccctcccagaaagaatatctggagatcaacaagatccctttggttctgagcagtgtggtgactccattcctcaacccctttatatatactctgaggaatgacacagtgcagggagtcctcagggatgtgtgggtcagggttcgaggagtttttgaaaagaggatgagggcagtgctgagaagcagattatcctccaacaaagaccaccaaggaagggcttgctcttctccaccatgtgtctattctgtaaagctccagtgttag

SEQ ID NO: 154 - protein, 347 aa, Homo Sapiens
MGNWTAAVTEFVLLGFSLSREVELLLLVLLLPTFLLTLLGNLLIISTVLSCSRLHTPMYFFLCNLSILDILFTSVISPKVLANLGSRDKTISFAGCITQCYFYFFLGTVEFLLLTVMSYDRYATICCPLRYTTIMRPSVCIGTVVFSWVGGFLSVLFPTILISQLPFCGSNIINHFFCDSGPLLALACADTTAIELMDFMLSSMVILCCIVLVAYSYTYIILTIVRIPSASGRKKAFNTCASHLTIVIIPSGITVFIYVTPSQKEYLEINKIPLVLSSVVTPFLNPFIYTLRNDTVQGVLRDVWVRVRGVFEKRMRAVLRSRLSSNKDHQGRACSSPPCVYSVKLQC

SEQ ID NO: 155 - DNA, 942 bp, Homo Sapiens
  CDS (1)..(939)
atggctggggaaaaccatactacactgcctgaattcctccttctgggattctctgacctcaaggccctgcagggccccctgttctgggtggtgcttctggtctacctggtcaccttgctgggtaactccctgatcatcctcctcacacaggtcagccctgccctgcactcccccatgtacttcttcctgcgccaactctcagtggtggagctcttctacaccactgacatcgtgcccaggaccctggccaatctgggctccccgcatccccaggccatctctttccagggctgtgcagcccagatgtacgtcttcattgtcctgggcatctcggagtgctgcctgctcacggccatggcctatgaccgatatgttgccatctgccagcccctacgctattccaccctcttgagcccacgggcctgcttggccatggtggggtcctcctggctcacaggcatcatcacggccaccacccatgcctccctcatcttctctctaccttttcgcagccacccgatcatcccgcactttctctgtgacatcctgccagtactgaggctggcaagtgctgggaagcacaggagcgagatctccgtgatgacagccaccatagtcttcattatgatccccttctctctgattgtcacctcttacatccgcatcctgggtgccatcctagcaatggcctccacccagagccgccgcaaggtcttctccacctgctcctcccatctgctcgtggtctctctcttctttggaacagccagcatcacctacatccggccgcaggcaggctcctctgttaccacagaccgcgtcctcagtctcttctacacagtcatcacacccatgctcaaccccatcatctacacccttcggaacaaggacgtgaggagggccctgcgacacttggtgaagaggcagcgcccctcaccctga

SEQ ID NO: 156 - protein, 313 aa, Homo Sapiens
MAGENHTTLPEFLLLGFSDLKALQGPLFWVVLLVYLVTLLGNSLIILLTQVSPALHSPMYFFLRQLSVVELFYTTDIVPRTLANLGSPHPQAISFQGCAAQMYVFIVLGISECCLLTAMAYDRYVAICQPLRYSTLLSPRACLAMVGSSWLTGIITATTHASLIFSLPFRSHPIIPHFLCDILPVLRLASAGKHRSEISVMTATIVFIMIPFSLIVTSYIRILGAILAMASTQSRRKVFSTCSSHLLVVSLFFGTASITYIRPQAGSSVTTDRVLSLFYTVITPMLNPIIYTLRNKDVRRALRHLVKRQRPSP

SEQ ID NO: 157 - DNA, 990 bp, Homo Sapiens
  CDS (1)..(987)
atgactttggtttcttttttctctttcctctccaagccattgataatgctccttagcaattcaagctggaggctatcccagccttcttttctcctggtagggattccaggtttagaggaaagccagcactggattgcactgcccctgggcatcctttacctccttgctttagtgggcaatgttaccattctcttcatcatctggatggacccatccttgcaccaatctatgtacctcttcctgtccatgctagctgccatcgacctggttctggcctcctccactgcacccaaagcccttgcagtgctcctggttcatgcccacgagattgggtacatcgtctgcctgatccagatgttcttcatccatgcattctcctccatggagtcaggggtacttgtggccatggctctggatcgctatgtagccatttgtcaccccttgcaccattccacaatcctgcatccaggggtcatagggcgcatcggaatggtggtgctggtgaggggattactactccttatccccttccccattttgttgggaacacttatcttctgccaagccaccatcataggccatgcctattgtgaacatatggctgttgtgaaacttgcctgctcagaaaccacagtcaatcgagcttatgggctgactatggccttgcttgtgattgggctggatgttctggccattggtgtttcctatgcccacatcctccaggcagtgctgaaggtaccagggagtgaggcccgacttaaggcgtttagcacatgtggctctcatatttgtgtcatcctggtcttctatgtccctggaattttctccttcctcactcaccgctttggtcatcatgtaccccatcatgtccatgttcttctggccacacggtatctcctcatgccacctgcgctcaatcctcttgtctatggagtgaagactcagcagatccgccagcgagtgctcagagtgtttacacaaaaggattga

SEQ ID NO: 158 - protein, 329 aa, Homo Sapiens
MTLVSFFSFLSKPLIMLLSNSSWRLSQPSFLLVGIPGLEESQHWIALPLGILYLLALVGNVTILFIIWMDPSLHQSMYLFLSMLAAIDLVLASSTAPKALAVLLVHAHEIGYIVCLIQMFFIHAFSSMESGVLVAMALDRYVAICHPLHHSTILHPGVIGRIGMVVLVRGLLLLIPFPILLGTLIFCQATIIGHAYCEHMAVVKLACSETTVNRAYGLTMALLVIGLDVLAIGVSYAHILQAVLKVPGSEARLKAFSTCGSHICVILVFYVPGIFSFLTHRFGHHVPHHVHVLLATRYLLMPPALNPLVYGVKTQQIRQRVLRVFTQKD

SEQ ID NO: 159 - DNA, 960 bp, Homo Sapiens
  CDS (1)..(957)
atgaatttggattcttttttctctttcctcctcaagtcattgataatggcacttagcaattccagctggaggctaccccagccttcttttttcctggtaggaattccgggtttagaggaaagccagcactggatcgcactgcccctgggcatcctttacctccttgctctagtgggcaatgttaccattctcttcatcatctggatggacccatccttgcaccaatctatgtacctcttcctgtccatgctagctgccatcgacctggttgtggcctcctccactgcacccaaagcccttgcagtgctcctggttcgtgcccaagagattggttacactgtctgcctgatccagatgttcttcacccatgcattctcctccatggagtcaggggtacttgtggccatggctctggatcgctatgtagccatttgtcaccccttgcaccattccacaatcctgcatccaggggtcatagggcacatcggaatggtggtgctggtgcggggattactactcctcatccccttcctcattctgttgcgaaaacttatcttctgccaagccaccatcataggccatgcctattgtgaacatatggctgttgtgaaacttgcctgctcagaaaccacagtcaatcgagcttatgggctgactgtggccttgcttgtggttgggctggatgtcctggccattggtgtttcctatgcccacattctccaggcagtgctgaaggtaccaggaaatgaggcccgacttaaggcctttagcacatgtggctctcatgtttgtgtcatcctggtcttctatatcccgggaatgttctccttcctcactcaccgctttggtcatcatgtaccccatcacgtccatgttcttctggccatactgtatcgccttgtgccacctgcactcaatcctcttgtctatagggtgaagacccagaagatccaccagtga

SEQ ID NO: 160 - protein, 319 aa, Homo Sapiens
MNLDSFFSFLLKSLIMALSNSSWRLPQPSFFLVGIPGLEESQHWIALPLGILYLLALVGNVTILFIIWMDPSLHQSMYLFLSMLAAIDLVVASSTAPKALAVLLVRAQEIGYTVCLIQMFFTHAFSSMESGVLVAMALDRYVAICHPLHHSTILHPGVIGHIGMVVLVRGLLLLIPFLILLRKLIFCQATIIGHAYCEHMAVVKLACSETTVNRAYGLTVALLVVGLDVLAIGVSYAHILQAVLKVPGNEARLKAFSTCGSHVCVILVFYIPGMFSFLTHRFGHHVPHHVHVLLAILYRLVPPALNPLVYRVKTQKIHQ

SEQ ID NO: 161 - DNA, 945 bp, Homo Sapiens
  CDS (1)..(942)
atgtcagcctccaatatcaccttaacacatccaactgccttcttgttggtggggattccaggcctggaacacctgcacatctggatctccatccctttctgcttagcatatacactggccctgcttggaaactgcactctccttctcatcatccaggctgatgcagccctccatgaacccatgtacctctttctggccatgttggcagccatcgacctggtcctttcctcctcagcactgcccaaaatgcttgccatattctggttcagggatcgggagataaacttctttgcctgtctggcccagatgttcttccttcactccttctccatcatggagtcagcagtgctgctggccatggcctttgaccgctatgtggctatctgcaagccactgcactacaccaaggtcctgactgggtccctcatcaccaagattggcatggctgctgtggcccgggctgtgacactaatgactccactccccttcctgctgagatgtttccactactgccgaggcccagtgatcgctcactgctactgtgaacacatggctgtggtgaggctggcgtgtggggacactagcttcaacaatatctatggcatcgctgtggccatgtttattgtggtgttggacctgctccttgttatcctgtcttatatctttattcttcaggcagttctactgcttgcctctcaggaggcccactacaaggcatttgggacatgtgtctctcatataggtgccatcttagccttctacacaactgtggtcatctcttcagtcatgcaccgtgtagcccgccatgctgcccctcatgtccacatcctccttgccaatttctatctgctcttcccacccatggtcaatcccataatctatggtgtcaagaccaagcaaatccgtgagagcatcttgggagtattcccaagaaaggatatgtag

SEQ ID NO: 162 - protein, 314 aa, Homo Sapiens
MSASNITLTHPTAFLLVGIPGLEHLHIWISIPFCLAYTLALLGNCTLLLIIQADAALHEPMYLFLAMLAAIDLVLSSSALPKMLAIFWFRDREINFFACLAQMFFLHSFSIMESAVLLAMAFDRYVAICKPLHYTKVLTGSLITKIGMAAVARAVTLMTPLPFLLRCFHYCRGPVIAHCYCEHMAVVRLACGDTSFNNIYGIAVAMFIVVLDLLLVILSYIFILQAVLLLASQEAHYKAFGTCVSHIGAILAFYTTVVISSVMHRVARHAAPHVHILLANFYLLFPPMVNPIIYGVKTKQIRESILGVFPRKDM

SEQ ID NO: 163 - DNA, 945 bp, Homo Sapiens
  CDS (1)..(942)
atgcttccctctaatatcacctcaacacatccagctgtctttttgttggtaggaattcctggtttggaacacctgcatgcctggatctccatccccttctgctttgcttatactctggccctgctaggcaactgtacccttctcttcattatccgggctgatgcagccctccatgaacccatgtacctctttctggccatgttggcaaccattgacttggttctttcttctacaacgctgcccaaaatgcttgccatattctggttcagggatcaggagatcaacttctttgcctgtctggtccagatgttcttccttcactccttctccatcatggagtcagcagtgctgctggccatggcctttgaccgctatgtggccatctgcaagccattgcactacacgacggtcctgactgggtccctcatcaccaagattggcatggctgctgtggcctgggctgtgacactaatgactccactccccttcctgctcagacgcttccactactgccgaggcccagtgattgcccattgctactgtgaacacatggctgtggtaaggctggcgtgtggggacactagcttcaacaatatctatggcattgctgtggccatgtttattgtggtgttggacctgctctttgttatcctgtcttatgtcttcatccttcaggcagttctccagcttgcctctcaggaggcccgctacaaggcatttgggacatgtgtgtctcacataggtgccatcctgtccacctacactccagtagtcatctcttcagtcatgcaccgtgtagcccgccatgctgcccctcgtgtccacatactccttgctattttctatctccttttcccacccatggtcaatcctatcatatatggagtcaagaccaagcagattcgtgagtatgtgctcagtctattccagagaaagaacatgtag

SEQ ID NO: 164 - protein, 314 aa, Homo Sapiens
MLPSNITSTHPAVFLLVGIPGLEHLHAWISIPFCFAYTLALLGNCTLLFIIRADAALHEPMYLFLAMLATIDLVLSSTTLPKMLAIFWFRDQEINFFACLVQMFFLHSFSIMESAVLLAMAFDRYVAICKPLHYTTVLTGSLITKIGMAAVAWAVTLMTPLPFLLRRFHYCRGPVIAHCYCEHMAVVRLACGDTSFNNIYGIAVAMFIVVLDLLFVILSYVFILQAVLQLASQEARYKAFGTCVSHIGAILSTYTPVVISSVMHRVARHAAPRVHILLAIFYLLFPPMVNPIIYGVKTKQIREYVLSLFQRKNM

SEQ ID NO: 165 - DNA, 984 bp, Homo Sapiens
  CDS (1)..(981)
atgcttcataccaacaatacacagtttcacccttccaccttcctcgtagtgggggtcccagggctggaagatgtgcatgtatggattggcttccccttctttgcggtgtatctaacagcccttctagggaacatcattatcctgtttgtgatacagactgaacagagcctccaccaacccatgttttacttcctagccatgttggccggcactgatctgggcttgtctacagcaaccatccccaagatgctgggaattttctggtttaatcttggagagattgcatttggtgcctgcatcacacagatgtataccattcatatatgcactggcctggagtctgtggtactgacagtcacgggcatagatcgctatattgccatctgcaaccccctgagatatagcatgatccttaccaacaaggtaatagccattctgggcatagtcatcattgtcaggactttggtatttgtgactccattcacatttctcaccctgagattgcctttctgtggtgtccggattatccctcatacctattgtgaacacatgggcttggcaaagttagcttgtgccagtattaatgttatatatggattgattgccttctcagtgggatacattgacatttctgtgattggattttcctatgtccagatcctccgagctgtcttccatctcccagcctgggatgcccggcttaaggcactcagcacatgtggctctcacgtctgtgttatgttggctttctacctgccagccctcttttccttcatgacacaccgctttggccacaacatccctcattacatccacattcttctggccaatctgtatgtggtttttccccctgctcttaactctgttatctatggggtcaaaacaaaacagatacgagagcaggtacttaggatactcaaccctaaaagcttttggcattttgaccccaagaggatcttccacaacaattcagttagacaataa

SEQ ID NO: 166 - protein, 327 aa, Homo Sapiens
MLHTNNTQFHPSTFLVVGVPGLEDVHVWIGFPFFAVYLTALLGNIIILFVIQTEQSLHQPMFYFLAMLAGTDLGLSTATIPKMLGIFWFNLGEIAFGACITQMYTIHICTGLESVVLTVTGIDRYIAICNPLRYSMILTNKVIAILGIVIIVRTLVFVTPFTFLTLRLPFCGVRIIPHTYCEHMGLAKLACASINVIYGLIAFSVGYIDISVIGFSYVQILRAVFHLPAWDARLKALSTCGSHVCVMLAFYLPALFSFMTHRFGHNIPHYIHILLANLYVVFPPALNSVIYGVKTKQIREQVLRILNPKSFWHFDPKRIFHNNSVRQ

SEQ ID NO: 167 - DNA, 954 bp, Homo Sapiens
  CDS (1)..(951)
atggcaggaagaatgtctacgtctaatcacacccagttccatccttcttcattcctactgctgggtatcccagggctagaagatgtgcacatttggattggagtcccttttttctttgtgtatcttgttgcactcctgggaaacactgctctcttgtttgtgatccagactgagcagagtctccatgagcctatgtactacttcctggccatgttggattccattgacctgggcttgtctacagccaccatccccaaaatgttgggcatcttctggttcaataccaaagaaatatcttttggaggctgcctttctcacatgttcttcatccatttcttcactgctatggagagcattgtgttggtggccatggcctttgaccgctacattgccatttgcaaacctcttcggtacaccatgatcctcaccagcaaaatcatcagcctcattgcaggcattgctgtcctgaggagcctgtacatggttgttccactggtgtttctccttctgaggctgcccttctgtgggcatcgtatcatccctcatacttattgtgagcacatgggcattgcccgtctggcctgtgccagcatcaaagtcaacattaggtttggccttggcaacatatctctcttgttactggatgttatccttattattctctcctatgtcaggatcctgtatgctgtcttctgcctgccctcctgggaagctcgactcaaagctctcaacacctgtggttctcatattggtgttatcttagccttttttacaccagcatttttttcattcttgacacatcgttttggccataatatcccacagtatatacatattatattagccaacctgtatgtggttgtcccaccagccctcaatcctgtaatctatggagtcaggacaaagcagattcgagagagagtgctgaggatttttctcaagaccaatcactaa

SEQ ID NO: 168 - protein, 317 aa, Homo Sapiens
MAGRMSTSNHTQFHPSSFLLLGIPGLEDVHIWIGVPFFFVYLVALLGNTALLFVIQTEQSLHEPMYYFLAMLDSIDLGLSTATIPKMLGIFWFNTKEISFGGCLSHMFFIHFFTAMESIVLVAMAFDRYIAICKPLRYTMILTSKIISLIAGIAVLRSLYMVVPLVFLLLRLPFCGHRIIPHTYCEHMGIARLACASIKVNIRFGLGNISLLLLDVILIILSYVRILYAVFCLPSWEARLKALNTCGSHIGVILAFFTPAFFSFLTHRFGHNIPQYIHIILANLYVVVPPALNPVIYGVRTKQIRERVLRIFLKTNH

SEQ ID NO: 169 - DNA, 972 bp, Homo Sapiens
  CDS (1)..(969)
atgagtcacaccaatgttaccatcttccatcctgcagtttttgtccttcctggcatccctgggttggaggcttatcacatttggctgtcaatacctctttgcctcatttacatcactgcagtcctgggaaacagcatcctgatagtggttattgtcatggaacgtaaccttcatgtgcccatgtatttcttcctctcaatgctggccgtcatggacatcctgctgtctaccaccactgtgcccaaggccctagccatcttttggcttcaagcacataacattgcttttgatgcctgtgtcacccaaggcttctttgtccatatgatgtttgtgggggagtcagctatcctgttagccatggcctttgatcgctttgtggccatttgtgccccactgagatatacaacagtgctaacatggcctgttgtggggaggattgctctggccgtcatcacccgaagcttctgcatcatcttcccagtcatattcttgctgaagcggctgcccttctgcctaaccaacattgttcctcactcctactgtgagcatattggagtggctcgtttagcctgtgctgacatcactgttaacatttggtatggcttctcagtgcccattgtcatggtcatcttggatgttatcctcatcgctgtgtcttactcactgatcctccgagcagtgtttcgtttgccctcccaggatgctcggcacaaggccctcagcacttgtggctcccacctctgtgtcatccttatgttttatgttccatccttctttaccttattgacccatcattttgggcgtaatattcctcaacatgtccatatcttgctggccaatctttatgtggcagtgccaccaatgctgaaccccattgtctatggtgtgaagactaagcagatacgtgagggtgtagcccaccggttctttgacatcaagacttggtgctgtacctcccctctgggctcatga

SEQ ID NO: 170 - protein, 323 aa, Homo Sapiens
MSHTNVTIFHPAVFVLPGIPGLEAYHIWLSIPLCLIYITAVLGNSILIVVIVMERNLHVPMYFFLSMLAVMDILLSTTTVPKALAIFWLQAHNIAFDACVTQGFFVHMMFVGESAILLAMAFDRFVAICAPLRYTTVLTWPVVGRIALAVITRSFCIIFPVIFLLKRLPFCLTNIVPHSYCEHIGVARLACADITVNIWYGFSVPIVMVILDVILIAVSYSLILRAVFRLPSQDARHKALSTCGSHLCVILMFYVPSFFTLLTHHFGRNIPQHVHILLANLYVAVPPMLNPIVYGVKTKQIREGVAHRFFDIKTWCCTSPLGS

SEQ ID NO: 171 - DNA, 963 bp, Homo Sapiens
  CDS (1)..(963)
atggcagaaactctacaactcaattccaccttcctacacccaaacttcttcatactgactggctttccagggctaggaagtgcccagacttggctgacactggtctttgggcccatttatctgctggccctgctgggcaatggagcactgccggcagtggtgtggatagactccacactgcaccagcccatgtttctactgttggccatcctggcagccacagacctgggcttagccacatctatagccccagggttgctggctgtgctgtggcttgggccccgatctgtgccatatgctgtgtgcctggtccagatgttctttgtacatgcactgactgccatggaatcaggtgtgcttttggccatggcctgtgatcgtgctgcggcaatagggcgtccactgcactaccctgtcctggtcaccaaagcctgtgtgggttatgcagccttggccctggcactgaaagctgtggctattgttgtacctttcccactgctggtggcaaagtttgagcacttccaagccaagaccataggccatacctattgtgcacacatggcagtggtagaactggtggtgggtaacacacaggccaccaacttatatggtctggcactttcactggccatctcaggtatggatattctgggtatcactggctcctatggactcattgcccatgctgtgctgcagctacctacccgggaggcccatgccaaggcctttggtacatgtagttctcacatctgtgtcattctggccttctacatacctggtctcttctcctacctcacacaccgctttggtcatcacactgtcccaaagcctgtgcacatccttctctccaacatctacttgctgctgccacctgccctcaaccccctcatctatggggcccgcaccaagcagatcagagaccgactcctggaaaccttcacattcagaaaaagcccgttgtaa

SEQ ID NO: 172 - protein, 320 aa, Homo Sapiens
MAETLQLNSTFLHPNFFILTGFPGLGSAQTWLTLVFGPIYLLALLGNGALPAVVWIDSTLHQPMFLLLAILAATDLGLATSIAPGLLAVLWLGPRSVPYAVCLVQMFFVHALTAMESGVLLAMACDRAAAIGRPLHYPVLVTKACVGYAALALALKAVAIVVPFPLLVAKFEHFQAKTIGHTYCAHMAVVELVVGNTQATNLYGLALSLAISGMDILGITGSYGLIAHAVLQLPTREAHAKAFGTCSSHICVILAFYIPGLFSYLTHRFGHHTVPKPVHILLSNIYLLLPPALNPLIYGARTKQIRDRLLETFTFRKSPL

SEQ ID NO: 173 - DNA, 960 bp, Homo Sapiens
  CDS (1)..(957)
atggatacctccaccagtgttacctatgactccagcctccagatttcccagttcatcctgatgggattaccaggcattcatgagtggcagcactggctctccctgcccctgactctgctctacctcttagctcttggtgccaacctcctcatcataatcaccattcaacatgagaccgtgctacatgaacccatgtaccatttgctgggcatattagcagtggtggacattggcctggccaccaccatcatgcccaagatcctggccatcttctggtttgatgccaaggccattagcctccccatgtgttttgctcagatctatgccatccactgcttcttctgcatagagtcaggcatctttctctgcatggcagtagacagatacatagccatctgtcgccctcttcagtacccctccatagtcactaaagcttttgtcttcaaagccacagggttcatcatgctcaggaatggcctgttgaccatcccagtgcctatactggctgcccagagacactactgttccaggaatgaaatcgagcactgcctctgctctaacttgggggttatcagcctggcttgtgatgacatcactgtgaacaaattttaccaactgatgctagcatgggtcttggttgggagtgatatggctctggtattttcttcctatgctgtaatccttcactctgtgctgaggctgaactcagcagaagcaatgtccaaggctctgagcacttgtagctcccacctcatcctcatcctcttccacacaggtatcattgtgctgtctgtcacacaccttgcagagaaaaagattccccttattcctgtgttccttaatgtgctgcacaatgtcatcccccctgcactcaaccccctggcctgtgcactcaggatgcacaaactcagactgggctttcagagactgcttggactgggtcaggacgtgtccaagtaa

SEQ ID NO: 174 - protein, 319 aa, Homo Sapiens
MDTSTSVTYDSSLQISQFILMGLPGIHEWQHWLSLPLTLLYLLALGANLLIIITIQHETVLHEPMYHLLGILAVVDIGLATTIMPKILAIFWFDAKAISLPMCFAQIYAIHCFFCIESGIFLCMAVDRYIAICRPLQYPSIVTKAFVFKATGFIMLRNGLLTIPVPILAAQRHYCSRNEIEHCLCSNLGVISLACDDITVNKFYQLMLAWVLVGSDMALVFSSYAVILHSVLRLNSAEAMSKALSTCSSHLILILFHTGIIVLSVTHLAEKKIPLIPVFLNVLHNVIPPALNPLACALRMHKLRLGFQRLLGLGQDVSK

SEQ ID NO: 175 - DNA, 963 bp, Homo Sapiens
  CDS (1)..(963)
atggcagaaactctacaactcaattccaccttcctacacccaaacttcttcatactgactggctttccagggctaggaagtgcccagacttggctgacactggtctttgggcccatttatctgctggccctgctgggcaatggagcactgccggcagtggtgtggatagactccacactgcaccagcccatgtttctactgttggccatcctggcagccacagacctgggcttagccacatctatagccccagggttgctggctgtgctgtggcttgggccccgatctgtgccatatgctgtgtgcctggtccagatgttctttgtacatgcactgactgccatggaatcaggtgtgcttttggccatggcctgtgatcgtgctgcggcaatagggcgtccactgcactaccctgtcctggtcaccaaagcctgtgtgggttatgcagccttggccctggcactgaaagctgtggctattgttgtacctttcccactgctggtggcaaagtttgagcacttccaagccaagaccataggccatacctattgtgcacacatggcagtggtagaactggtggtgggtaacacacaggccaccaacttatatggtctggcactttcactggccatctcaggtatggatattctgggtatcactggctcctatggactcattgcccatgctgtgctgcagctacctacccgggaggcccatgccaaggcctttggtacatgtagttctcacatctgtgtcattctggccttctacatacctggtctcttctcctacctcgcacaccgctttggtcatcacactgtcccaaagcctgtgcacatccttctctccaacatctacttgctgctgccacctgccctcaaccccctcatctatggggcccgcaccaagcagatcagagaccgactcctggaaaccttcacattcagaaaaagcccgttgtaa

SEQ ID NO: 176 - protein, 320 aa, Homo Sapiens [sequence omitted]

SEQ ID NO: 177 - DNA, 1008 bp, Homo Sapiens
  CDS (1)..(1005)
atggcacaggtgagggcgctgcataaaatcatggcccttttttctgctaacagcataggtgctatgaacaactctgacactcgcatagcaggctgcttcctcactggcatccctgggctggagcaactacatatctggctgtccatccccttctgcatcatgtacatcgctgccctggaaggcaatggcatcctaatttgtgtcatcctctcccaggcaatcctgcatgagcccatgtacatattcttatctatgctggccagtgctgatgtcttgctctctaccaccaccatgcctaaggccctggccaatttgtggctaggttatagccacatttcctttgatggctgcctcactcaaaagttcttcattcacttcctcttcattcactctgctgtcctgctggccatggcctttgaccgctatgtggccatctgctcccccctgcgatatgtcacaatcctcacaagcaaggtcattgggaagatcgtcactgccaccctgagccgcagcttcatcattatgtttccatccatctttctccttgagcacctgcactattgccagatcaacatcattgcacacacattttgtgagcacatgggcattgcccatctgtcctgttctgatatctccatcaatgtctggtatgggttggcagctgctcttctctccacaggcctggacatcatgcttattactgtttcctacatccacatcctccaagcagtcttccgcctcctttctcaagatgcccgctccaaggccctgagtacctgtggatcccatatctgtgtcatcctactcttctatgtccctgcccttttttctgtctttgcctacaggtttggtgggagaagcatcccatgctatgtccatattctcctggccagcctctacgttgtcattcctcctatgctcaatcccgttatttatggagtgaggactaagccaatactggaaggggctaagcagatgttttcaaatcttgccaaaggatctaaataa

SEQ ID NO: 178 - protein, 335 aa, Homo Sapiens
MAQVRALHKIMALFSANSIGAMNNSDTRIAGCFLTGIPGLEQLHIWLSIPFCIMYIAALEGNGILICVILSQAILHEPMYIFLSMLASADVLLSTTTMPKALANLWLGYSHISFDGCLTQKFFIHFLFIHSAVLLAMAFDRYVAICSPLRYVTILTSKVIGKIVTATLSRSFIIMFPSIFLLEHLHYCQINIIAHTFCEHMGIAHLSCSDISINVWYGLAAALLSTGLDIMLITVSYIHILQAVFRLLSQDARSKALSTCGSHICVILLFYVPALFSVFAYRFGGRSIPCYVHILLASLYVVIPPMLNPVIYGVRTKPILEGAKQMFSNLAKGSK

SEQ ID NO: 179 - DNA, 945 bp, Homo Sapiens
  CDS (1)..(945)
atgatcattttcaacctgagcagttacaatccaggacccttcattctggtagggatcccaggcctggagcaattccatgtgtggattggaattcccttctgtatcatctacattgtagctgttgtgggaaactgcatccttctctacctcattgtggtggagcatagtcttcatgaacccatgttcttctttctctccatgctggccatgactgacctcatcttgtccacagctggtgtgcctaaagcactcagtatcttttggctaggggctcgcgaaatcacattcccaggatgccttacacaaatgttcttccttcactataactttgtcctggattcagccattctgatggccatggcatttgatcactatgtagctatctgttctcccttgagatataccaccatcttgactcccaagaccatcatcaagagtgctatgggcatctcctttcgaagcttctgcatcatcctgccagatgtattcttgctgacatgcctgcctttctgcaggacacgcatcataccccacacatactgtgagcatataggtgttgcccagctcgcctgtgctgatatctccatcaacttctggtatggcttttgtgttcccatcatgacggtcatctcagatgtgattctcattgctgtttcctacgcacacatcctctgtgctgtctttggccttccctcccaagatgcctgccagaaagccctcggcacttgtggttctcatgtctgtgtcatcctcatgttttatacacctgcctttttctccatcctcgcccatcgctttggacacaatgtctctcgcaccttccacatcatgtttgccaatctctacattgttatcccacctgcactcaaccccatggtttacggagtgaagaccaagcagatcagagataaggttatacttttgttttctaagggtacaggatga

SEQ ID NO: 180 - protein, 314 aa, Homo Sapiens
MIIFNLSSYNPGPFILVGIPGLEQFHVWIGIPFCIIYIVAVVGNCILLYLIVVEHSLHEPMFFFLSMLAMTDLILSTAGVPKALSIFWLGAREITFPGCLTQMFFLHYNFVLDSAILMAMAFDHYVAICSPLRYTTILTPKTIIKSAMGISFRSFCIILPDVFLLTCLPFCRTRIIPHTYCEHIGVAQLACADISINFWYGFCVPIMTVISDVILIAVSYAHILCAVFGLPSQDACQKALGTCGSHVCVILMFYTPAFFSILAHRFGHNVSRTFHIMFANLYIVIPPALNPMVYGVKTKQIRDKVILLFSKGTG

SEQ ID NO: 181 - DNA, 981 bp, Homo Sapiens
  CDS (1)..(978)
atgtcagtccaatattcgctcagtcctcaattcatgctgctatccaacattactcagtttagccccatattctatctcaccagctttcctggattggaaggcatcaaacactggattttcatcccctttttctttatgtacatggttgccatctcaggcaattgtttcattctgatcattattaagaccaaccctcgtctgcacacacccatgtactatctactatccttgctggccctcactgacctggggctgtgtgtgtccacgttgcccaccactatggggatcttctggtttaactcccagagtatctactttggagcgtgtcaaatccagatgttctgcatccactctttttccttcatggagtcctcagtgctcctcatgatgtcctttgaccgctttgtggccatctgccaccctctgaggtattcggtcattatcactggccagcaagtggtcagagcaggcctaattgtcatcttccggggacctgtggccactatccctattgtcctcctcctgaaggcttttccctactgtggatctgtggtcctctcccactcattttgcctgcaccaggaagtgatacagctggcctgcacagataccaccttcaataatctgtatggactgatggtggtagttttcactgtgatgctggacctggtgctcatcgcactgtcctatggactcatcctgcacacagtagcaggcctggcctcccaagaggagcagcgccgtgcctttcagacatgcaccgctcatctctgtgctgtgctagtattctttgtgcccatgatggggctgtccctggtgcaccgttttgggaagcatgccccacctgctattcatcttcttatggccaatgtctacctttttgtgcctcccatgcttaacccaatcatatacagcattaagaccaaggagatccaccgtgccattatcaaactcctaggtcttaaaaaggccagtaaatga

SEQ ID NO: 182 - protein, 326 aa, Homo Sapiens
MSVQYSLSPQFMLLSNITQFSPIFYLTSFPGLEGIKHWIFIPFFFMYMVAISGNCFILIIIKTNPRLHTPMYYLLSLLALTDLGLCVSTLPTTMGIFWFNSQSIYFGACQIQMFCIHSFSFMESSVLLMMSFDRFVAICHPLRYSVIITGQQVVRAGLIVIFRGPVATIPIVLLLKAFPYCGSVVLSHSFCLHQEVIQLACTDTTFNNLYGLMVVVFTVMLDLVLIALSYGLILHTVAGLASQEEQRRAFQTCTAHLCAVLVFFVPMMGLSLVHRFGKHAPPAIHLLMANVYLFVPPMLNPIIYSIKTKEIHRAIIKLLGLKKASK

SEQ ID NO: 183 - DNA, 975 bp, Homo Sapiens
  CDS (1)..(972)
atgaatcatatgtctgcatctctcaaaatctccaatagctccaaattccaggtctctgagttcatcctgctgggattcccgggcattcacagctggcaacactggctatctctgcccctggcactactgtatctctcagcacttgctgcaaacaccctcatcctcatcatcatctggcagaacccttctttacagcagcccatgtatattttccttggcatcctctgtatggtagacatgggtctggccactactatcatccctaagatcctggccatcttctggtttgatgccaaggttattagcctccctgagtgctttgctcagatttatgccattcacttctttgtgggcatggagtctggtatcctactctgcatggcttttgatagatatgtggctatttgtcaccctcttcgctatccatcaattgtcaccagttccttaatcttaaaagctaccctgttcatggtgctgagaaatggcttatttgtcactccagtgcctgtgcttgcagcacagcgtgattattgctccaagaatgaaattgaacactgcctgtgctctaaccttggggtcacaagcctggcttgtgatgacaggaggccaaacagcatttgccagttggttctggcatggcttggaatggggagtgatctaagtcttattatactgtcatatattttgattctgtactctgtacttagactgaactcagctgaagctgcagccaaggccctgagcacttgtagttcacatctcaccctcatccttttcttttacactattgttgtagtgatttcagtgactcatctgacagagatgaaggctactttgattccagttctacttaatgtgttgcacaacatcatccccccttccctcaaccctacagtttatgcacttcagaccaaagaacttagggcagccttccaaaaggtgctgtttgcccttacaaaagaaataagatcttag

SEQ ID NO: 184 - protein, 324 aa, Homo Sapiens
MNHMSASLKISNSSKFQVSEFILLGFPGIHSWQHWLSLPLALLYLSALAANTLILIIIWQNPSLQQPMYIFLGILCMVDMGLATTIIPKILAIFWFDAKVISLPECFAQIYAIHFFVGMESGILLCMAFDRYVAICHPLRYPSIVTSSLILKATLFMVLRNGLFVTPVPVLAAQRDYCSKNEIEHCLCSNLGVTSLACDDRRPNSICQLVLAWLGMGSDLSLIILSYILILYSVLRLNSAEAAAKALSTCSSHLTLILFFYTIVVVISVTHLTEMKATLIPVLLNVLHNIIPPSLNPTVYALQTKELRAAFQKVLFALTKEIRS

SEQ ID NO: 185 - DNA, 978 bp, Homo Sapiens
  CDS (1)..(975)
atgttccttcccaatgacacccagtttcacccctcctccttcctgttgctggggatcccaggactagaaacacttcacatctggatcggctttcccttctgtgctgtgtacatgatcgcactcatagggaacttcactattctacttgtgatcaagactgacagcagcctacaccagcccatgttctacttcctggccatgttggccaccactgatgtgggtctctcaacagctaccatccctaagatgcttggaatcttctggatcaacctcagagggatcatctttgaagcctgcctcacccagatgttttttatccacaacttcacacttatggagtcagcagtccttgtggcaatggcttatgacagctatgtggccatctgcaatccactccaatatagcgccatcctcaccaacaaggttgtttctgtgattggtcttggtgtgtttgtgagggctttaattttcgtcattccctctatacttcttatattgcggttgcccttctgtgggaatcatgtaattccccacacctactgtgagcacatgggtcttgctcatctatcttgtgccagcatcaaaatcaatattatttatggtttatgtgccatttgtaatctggtgtttgacatcacagtcattgccctctcttatgtgcatattctttgtgctgttttccgtcttcctactcatgagccccgactcaagtccctcagcacatgtggttcacatgtgtgtgtaatccttgccttctatacaccagccctcttttcctttatgactcattgctttggccgaaatgtgccccgctatatccatatactcctagccaatctctatgttgtggtgccaccaatgctcaatcctgtcatatatggagtcagaaccaagcagatctataaatgtgtaaagaaaatattattgcaggaacaaggaatggaaaaggaagagtacctaatacatacgaggttctga

SEQ ID NO: 186 - protein, 325 aa, Homo Sapiens
MFLPNDTQFHPSSFLLLGIPGLETLHIWIGFPFCAVYMIALIGNFTILLVIKTDSSLHQPMFYFLAMLATTDVGLSTATIPKMLGIFWINLRGIIFEACLTQMFFIHNFTLMESAVLVAMAYDSYVAICNPLQYSAILTNKVVSVIGLGVFVRALIFVIPSILLILRLPFCGNHVIPHTYCEHMGLAHLSCASIKINIIYGLCAICNLVFDITVIALSYVHILCAVFRLPTHEPRLKSLSTCGSHVCVILAFYTPALFSFMTHCFGRNVPRYIHILLANLYVVVPPMLNPVIYGVRTKQIYKCVKKILLQEQGMEKEEYLIHTRF

SEQ ID NO: 187 - DNA, 1029 bp, Homo Sapiens
  CDS (1)..(1026)
atgactgaaacatccctgtcttctcagtgcttccctatgtcggtcctcaataataccattgctgagcctctgatcttcctcctgatgggcattccaggcctgaaagccacccagtactggatctccatccctttttgtctcctatatgttgttgccgtctctggaaatagcatgatcctgtttgtggtcctctgtgaacggagcctccataagcctatgtactatttcctctctatgctttcagccacagacctgagcttgtccctgtgtacactttctactacccttggtgtcttctggtttgaagcccgagaaatcaacctaaatgcctgcattgcccagatgttctttctacacggatttactttcatggagtctggggttctactggccatggcctttgatcgttttgtggccatctgttacccactgagatacactaccatccttaccaatgcccgaattgccaagattgggatgagcatgttgataagaaatgttgccgtcatgttgccagtcatgctctttgtcaagaggttgtccttctgcagttctatggtcctttcacattcttactgctaccatgttgatctcatccaactctcctgcacagacaataggatcaacagcatccttggtctgtttgcgcttttgtccactacagggtttgactgcccttgcatcctgctctcctatatcctgatcattcgatctgtcctcagcattgcttcctcagaagagaggcggaaagccttcaacacctgcacatcccacatcagtgctgtttccatcttctacctccctctcatcagtttgtctcttgtccatcgctatggccattcagcacctccatttgtccacatcatcatggccaatgtctttctgctaatccctcctgtgctcaaccctattatttacagtgtaaagattaagcagattcaaaaggccattatcaaggtcttaattcagaagcactccaaatctaatcatcagctatttctgattagagataaagccatttatgaataa

SEQ ID NO: 188 - protein, 342 aa, Homo Sapiens
MTETSLSSQCFPMSVLNNTIAEPLIFLLMGIPGLKATQYWISIPFCLLYVVAVSGNSMILFVVLCERSLHKPMYYFLSMLSATDLSLSLCTLSTTLGVFWFEAREINLNACIAQMFFLHGFTFMESGVLLAMAFDRFVAICYPLRYTTILTNARIAKIGMSMLIRNVAVMLPVMLFVKRLSFCSSMVLSHSYCYHVDLIQLSCTDNRINSILGLFALLSTTGFDCPCILLSYILIIRSVLSIASSEERRKAFNTCTSHISAVSIFYLPLISLSLVHRYGHSAPPFVHIIMANVFLLIPPVLNPIIYSVKIKQIQKAIIKVLIQKHSKSNHQLFLIRDKAIYE

SEQ ID NO: 189 - DNA, 948 bp, Homo Sapiens
  CDS (1)..(945)
atggtgctggcttcagggaacagctcttctcatcctgtgtccttcatcctgcttggaatcccaggcctggagagtttccagttgtggattgcctttccgttctgtgccacgtatgctgtggctgttgttggaaatatcactctcctccatgtaatcagaattgaccacaccctgcatgagcccatgtacctctttctggccatgctggccatcactgacctggtcctctcctcctccactcaacctaagatgttggccatattctggtttcatgctcatgagattcagtaccatgcctgcctcatccaggtgttcttcatccatgccttttcttctgtggagtctggggtgctcatggctatggccctggactgctacgtggctacctgcttcccactccgacactctagcatcctgaccccatcggtcgtgatcaaactggggaccatcgtgatgctgagagggctgctgtgggtgagccccttctgcttcatggtgtctaggatgcccttctgccaacaccaagccattccccagtcatactgtgagcacatggctgtgctgaagttggtgtgtgctgatacaagcataagtcgtgggtatgggctctttgtggccttctctgtggctggctttgatatgattgtcattggtatgtcatacgtgatgattttgagagctgtgcttcagttgccctcaggtgaagcccgcctcaaagcttttagcacacgtgcctcccatatctgtgtcatcttggctctttatatcccagcccttttttctttcctcacctaccgctttggccatgatgtgccccgagttgtacacatcctgtttgctaatctctatctactgatacctcccatgctcaaccccatcatttatggagttagaaccaaacagatcggggacagggttatccaaggatgttgtggaaacatcccctga

SEQ ID NO: 190 - protein, 315 aa, Homo Sapiens
MVLASGNSSSHPVSFILLGIPGLESFQLWIAFPFCATYAVAVVGNITLLHVIRIDHTLHEPMYLFLAMLAITDLVLSSSTQPKMLAIFWFHAHEIQYHACLIQVFFIHAFSSVESGVLMAMALDCYVATCFPLRHSSILTPSVVIKLGTIVMLRGLLWVSPFCFMVSRMPFCQHQAIPQSYCEHMAVLKLVCADTSISRGYGLFVAFSVAGFDMIVIGMSYVMILRAVLQLPSGEARLKAFSTRASHICVILALYIPALFSFLTYRFGHDVPRVVHILFANLYLLIPPMLNPIIYGVRTKQIGDRVIQGCCGNIP

SEQ ID NO: 191 - DNA, 942 bp, Homo Sapiens
  CDS (1)..(939)
atgtccattatcaacacatcatatgttgaaatcaccaccttcttcttggttgggatgccagggctagaatatgcacacatctggatctctatccccatctgcagcatgtatcttattgctattctaggaaattgcaccattctttttatcatcaagacagagccctccttgcatgagcccatgtactattttctttccatgttggctatgtcagacttgggtttgtctttatcatctctgcccactgtgttaagcatcttcctgttcaatgctcctgaaatttcatccaatgcctgctttgcccaggaattcttcattcatggattctcagtactggagtcctcagtcctcctgatcatgtcatttgatagattcctagccatccacaaccctctgagatacacctcaatcctgacaactgtcagagttgcccaaatagggatagtattctcctttaagagcatgctcctggttcttcccttccctttcactttaagaaacttgagatattgcaagaaaaaccaattatcccattcctactgtctccaccaggatgtcatgaagttggcctgttctgacaacagaattgatgttatctatggcttttttggagcactctgccttatggtagactttattctcattgctgtgtcttacaccctgatcctcaagactgtaccgggaattgcatccaaaaaggagcagcttaaggctctcaatacttgtgtttcacacatctgtgcagtgatcatcttctacctgcccatcatcaacctggccgttgtccaccgctttgcccggcatgtctctcccctcattaatgttctcatggcaaatgttctcctacttgtacctccactgatgaacccaattgtttattgtgtaaaaactaaacagattagagtgagagttgtagcaaaattgtgtcaacggaagatttaa

SEQ ID NO: 192 - protein, 313 aa, Homo Sapiens [sequence omitted]

SEQ ID NO: 193 - DNA, 966 bp, Homo Sapiens
  CDS (1)..(963)
atgacaattcttcttaatagcagcctccaaagagccactttcttcctgacgggcttccaaggtctagaaggtctccatggctggatctctattcccttctgcttcatctacctgacagttatcttggggaacctcaccattctccacgtcatttgtactgatgccactctccatggacccatgtactatttcttgggcatgctagctgtcacagacttaggcctttgcctttccacactgcccactgtgctgggcattttctggtttgataccagagagattggcatccctgcctgtttcactcagctcttcttcatccacaccttgtcttcaatggagtcatcagttctgttatccatgtccattgaccgctccgtggccgtctgcaacccactgcatgactccaccgtcctgacacctgcatgtattgtcaagatggggctaagctcagtgcttagaagtgctctcctcatcctccccttgccattcctcctgaagcgcttccaatactgccactcccatgtgctggctcatgcttattgtcttcacctggagatcatgaagctggcctgctctagcatcattgtcaatcacatctatgggctctttgttgtggcctgcaccgtgggtgtggactccctgctcatctttctctcatacgccctcatccttcgcaccgtgctcagcattgcctcccaccaggagcgactccgagccctcaacacctgtgtctctcatatctgtgctgtactgctcttctacatccccatgattggcttgtctcttgtgcatcgctttggtgaacatctgccccgcgttgtacacctcttcatgtcctatgtgtatctgctggtaccaccccttatgaaccccatcatctacagcatcaagaccaagcaaattcgccagcgcatcattaagaagtttcagtttataaagtcacttaggtgtttttggaaggattaa

SEQ ID NO: 194 - protein, 321 aa, Homo Sapiens
MTILLNSSLQRATFFLTGFQGLEGLHGWISIPFCFIYLTVILGNLTILHVICTDATLHGPMYYFLGMLAVTDLGLCLSTLPTVLGIFWFDTREIGIPACFTQLFFIHTLSSMESSVLLSMSIDRSVAVCNPLHDSTVLTPACIVKMGLSSVLRSALLILPLPFLLKRFQYCHSHVLAHAYCLHLEIMKLACSSIIVNHIYGLFVVACTVGVDSLLIFLSYALILRTVLSIASHQERLRALNTCVSHICAVLLFYIPMIGLSLVHRFGEHLPRVVHLFMSYVYLLVPPLMNPIIYSIKTKQIRQRIIKKFQFIKSLRCFWKD

SEQ ID NO: 195 - DNA, 984 bp, Homo Sapiens
  CDS (1)..(981)
atggcaatattcaataacaccacttcgtcttcctcaaacttcctcctcactgcattccctgggctggaatgtgctcatgtctggatctccattccagtctgctgtctctacaccattgccctcttgggaaacagtatgatctttcttgtcatcattactaagcggagactccacaaacccatgtattatttcctctccatgctggcagctgttgatctatgtctgaccattacgacccttcccactgtgcttggtgttctctggtttcatgcccgggagatcagctttaaagcttgcttcattcaaatgttctttgtgcatgctttctccttgctggagtcctcggtgctggtagccatggcctttgaccgcttcgtggctatctgtaacccactgaactatgctactatcctcacagacaggatggtcctggtgatagggctggtcatctgcattagaccagcagttttcttacttccccttcttgtagccataaacactgtgtcttttcatgggggtcacgagctttcccatccattttgctaccacccagaagtgatcaaatacacatattccaaaccttggatcagcagtttttggggactgtttcttcagctctacctgaatggcactgacgtattgtttattcttttctcctatgtcctgatcctccgtactgttctgggcattgtggcccgaaagaagcaacaaaaagctctcagcacttgtgtctgtcacatctgtgcagtcactattttctatgtgccactgatcagcctctctttggcacaccgcctcttccactccaccccaagggtgctctgtagcactttggccaatatttatctgctcttaccacctgtgctgaaccctatcatttacagcttgaagaccaagacaatccgccaggctatgttccagctgctccaatccaagggttcatggggttttaatgtgaggggtcttaggggaagatgggattga

SEQ ID NO: 196 - protein, 327 aa, Homo Sapiens
MAIFNNTTSSSSNFLLTAFPGLECAHVWISIPVCCLYTIALLGNSMIFLVIITKRRLHKPMYYFLSMLAAVDLCLTITTLPTVLGVLWFHAREISFKACFIQMFFVHAFSLLESSVLVAMAFDRFVAICNPLNYATILTDRMVLVIGLVICIRPAVFLLPLLVAINTVSFHGGHELSHPFCYHPEVIKYTYSKPWISSFWGLFLQLYLNGTDVLFILFSYVLILRTVLGIVARKKQQKALSTCVCHICAVTIFYVPLISLSLAHRLFHSTPRVLCSTLANIYLLLPPVLNPIIYSLKTKTIRQAMFQLLQSKGSWGFNVRGLRGRWD

SEQ ID NO: 197 - DNA, 975 bp, Homo Sapiens
  CDS (1)..(972)
atgctgggtccagcttataaccacacaatggaaacccctgcctccttcctccttgtgggtatcccaggactgcaatcttcacatctttggctggctatctcactgagtgccatgtacatcatagccctgttaggaaacaccatcatcgtgactgcaatctggatggattccactcggcatgagcccatgtattgctttctgtgtgttctggctgctgtggacattgttatggcctcctcggtggtacccaagatggtgagcatcttctgctcaggagacagctcaatcagctttagtgcttgtttcactcagatgttttttgtccacttagccacagctgtggagacggggctgctgctgaccatggcttttgaccgctatgtagccatctgcaagcctctacactacaagagaattctcacgcctcaagtgatgctgggaatgagtatggccatcaccatcagagctatcatagccataactccactgagttggatggtgagtcatctacctttctgtggctccaatgtggttgtccactcctactgtgagcacatagctttggccaggttagcatgtgctgaccccgtgcccagcagtctctacagtctgattggttcctctcttatggtgggctctgatgtggccttcattgctgcctcctatatcttaattctcaaggcagtatttggtctctcctcaaagactgctcagttgaaagcattaagcacatgtggctcccatgtgggggttatggctttgtactatctacctgggatggcatccatctatgcggcctggttggggcaggatgtagtgcccttgcacacccaagtcctgctagctgacctgtacgtgatcatcccagccaccttaaatcccatcatctatggcatgaggaccaaacaactgcgggagagaatatggagttatctgatgcatgtcctctttgaccattccaacctgggttcatga

SEQ ID NO: 198 - protein, 324 aa, Homo Sapiens
MLGPAYNHTMETPASFLLVGIPGLQSSHLWLAISLSAMYIIALLGNTIIVTAIWMDSTRHEPMYCFLCVLAAVDIVMASSVVPKMVSIFCSGDSSISFSACFTQMFFVHLATAVETGLLLTMAFDRYVAICKPLHYKRILTPQVMLGMSMAITIRAIIAITPLSWMVSHLPFCGSNVVVHSYCEHIALARLACADPVPSSLYSLIGSSLMVGSDVAFIAASYILILKAVFGLSSKTAQLKALSTCGSHVGVMALYYLPGMASIYAAWLGQDVVPLHTQVLLADLYVIIPATLNPIIYGMRTKQLRERIWSYLMHVLFDHSNLGS

SEQ ID NO: 199 - DNA, 963 bp, Homo Sapiens
  CDS (1)..(960)
atgagttcctgcaacttcacacatgccacctttgtgcttattggtatcccaggattagagaaagcccatttctgggttggcttccccctcctttccatgtatgtagtggcaatgtttggaaactgcatcgtggtcttcatcgtaaggacggaacgcagcctgcacgctccgatgtacctctttctctgcatgcttgcagccattgacctggccttatccacatccaccatgcctaagatccttgcccttttctggtttgattcccgagagattagctttgaggcctgtcttacccagatgttctttattcatgccctctcagccattgaatccaccatcctgctggccatggcctttgaccgttatgtggccatctgccacccactgcgccatgctgcagtgctcaacaatacagtaacagcccagattggcatcgtggctgtggtccgcggatccctcttttttttcccactgcctctgctgatcaagcggctggccttctgccactccaatgtcctctcgcactcctattgtgtccaccaggatgtaatgaagttggcctatgcagacactttgcccaatgtggtatatggtcttactgccattctgctggtcatgggcgtggacgtaatgttcatctccttgtcctattttctgataatacgaacggttctgcaactgccttccaagtcagagcgggccaaggcctttggaacctgtgtgtcacacattggtgtggtactcgccttctatgtgccacttattggcctctcagtggtacaccgctttggaaacagccttcatcccattgtgcgtgttgtcatgggtgacatctacctgctgctgcctcctgtcatcaatcccatcatctatggtgccaaaaccaaacagatcagaacacgggtgctggctatgttcaagatcagctgtgacaaggacttgcaggctgtgggaggcaagtga

SEQ ID NO: 200 - protein, 320 aa, Homo Sapiens
MSSCNFTHATFVLIGIPGLEKAHFWVGFPLLSMYVVAMFGNCIVVFIVRTERSLHAPMYLFLCMLAAIDLALSTSTMPKILALFWFDSREISFEACLTQMFFIHALSAIESTILLAMAFDRYVAICHPLRHAAVLNNTVTAQIGIVAVVRGSLFFFPLPLLIKRLAFCHSNVLSHSYCVHQDVMKLAYADTLPNVVYGLTAILLVMGVDVMFISLSYFLIIRTVLQLPSKSERAKAFGTCVSHIGVVLAFYVPLIGLSVVHRFGNSLHPIVRVVMGDIYLLLPPVINPIIYGAKTKQIRTRVLAMFKISCDKDLQAVGGK

SEQ ID NO: 201 - DNA, 975 bp, Homo Sapiens
  CDS (1)..(972)
atgctgggtccagcttacaaccacacaatggaaacccctgcctccttcctccttgtgggtatcccaggactgcaatcttcacatctttggctggctatctcactgagtgccatgtacatcacagccctgttaggaaacaccctcatcgtgactgcaatctggatggattccactcggcatgagcccatgtattgctttctgtgtgttctggctgctgtggacattgttatggcctcctccgtggtacccaagatggtgagcatcttctgctcgggagacagctccatcagctttagtgcttgtttcactcagatgttttttgtccacttagccacagctgtggagacggggctgctgctgaccatggcttttgaccgctatgtagccatctgcaagcctctacactacaagagaattctcacgcctcaagtgatgctgggaatgagtatggccgtcaccatcagagctgtcacattcatgactccactgagttggatgatgaatcatctacctttctgtggctccaatgtggttgtccactcctactgtaagcacatagctttggccaggttagcatgtgctgaccccgtgcccagcagtctctacagtctgattggttcctctcttatggtgggctctgatgtggccttcattgctgcctcctatatcttaattctcagggcagtatttgatctctcctcaaagactgctcagttgaaagcattaagcacatgtggctcccatgtgggggttatggctttgtactatctacctgggatggcatccatctatgcggcctggttggggcaggatatagtgcccttgcacacccaagtgctgctagctgacctgtacgtgatcatcccagccactttaaatcccatcatctatggcatgaggaccaaacaattgctggagggaatatggagttatctgatgcacttcctctttgaccactccaacctgggttcatga

SEQ ID NO: 202 - protein, 324 aa, Homo Sapiens
MLGPAYNHTMETPASFLLVGIPGLQSSHLWLAISLSAMYITALLGNTLIVTAIWMDSTRHEPMYCFLCVLAAVDIVMASSVVPKMVSIFCSGDSSISFSACFTQMFFVHLATAVETGLLLTMAFDRYVAICKPLHYKRILTPQVMLGMSMAVTIRAVTFMTPLSWMMNHLPFCGSNVVVHSYCKHIALARLACADPVPSSLYSLIGSSLMVGSDVAFIAASYILILRAVFDLSSKTAQLKALSTCGSHVGVMALYYLPGMASIYAAWLGQDIVPLHTQVLLADLYVIIPATLNPIIYGMRTKQLLEGIWSYLMHFLFDHSNLGS

SEQ ID NO: 203 - DNA, 975 bp, Homo Sapiens
  CDS (1)..(972)
atgcagaagccccagctcttggtccctatcatagccacttcaaatggaaatctggtccacgcagcatacttccttttggtgggtatccctggcctggggcctaccatacacttttggctggctttcccactgtgttttatgtatgccttggccaccctgggtaacctgaccattgtcctcatcattcgtgtggagaggcgactgcatgagcccatgtacctcttcctggccatgctttccactattgacctagtcctctcctctatcaccatgcccaagatggccagtcttttcctgatgggcatccaggagatcgagttcaacatttgcctggcccagatgttccttatccatgctctgtcagccgtggagtcagctgtcctgctggccatggcttttgaccgctttgtggccatttgccacccattgcgccatgcttctgtgctgacagggtgtactgtggccaagattggactatctgccctgaccagggggtttgtattcttcttcccactgcccttcatcctcaagtggttgtcctactgccaaacacatactgtcacacactccttctgtctgcaccaagatattatgaagctgtcctgtactgacaccagggtcaatgtggtttatggactcttcatcatcctctcagtcatgggtgtggactctctcttcattggcttctcatatatcctcatcctgtgggctgttttggagctgtcctctcggagggcagcactcaaggctttcaacacctgcatctcccacctctgtgctgttctggtcttctatgtacccctcattgggctctcggtggtgcataggctgggtggtcccacctccctcctccatgtggttatggctaatacctacttgctgctaccacctgtagtcaacccccttgtctatggagccaagaccaaagagatctgttcaagggtcctctgtatgttctcacaaggtggcaagtga

SEQ ID NO: 204 - protein, 324 aa, Homo Sapiens
MQKPQLLVPIIATSNGNLVHAAYFLLVGIPGLGPTIHFWLAFPLCFMYALATLGNLTIVLIIRVERRLHEPMYLFLAMLSTIDLVLSSITMPKMASLFLMGIQEIEFNICLAQMFLIHALSAVESAVLLAMAFDRFVAICHPLRHASVLTGCTVAKIGLSALTRGFVFFFPLPFILKWLSYCQTHTVTHSFCLHQDIMKLSCTDTRVNVVYGLFIILSVMGVDSLFIGFSYILILWAVLELSSRRAALKAFNTCISHLCAVLVFYVPLIGLSVVHRLGGPTSLLHVVMANTYLLLPPVVNPLVYGAKTKEICSRVLCMFSQGGK

SEQ ID NO: 205 - DNA, 943 bp, Homo Sapiens
  CDS (1)..(942)
atgctcacttttcataatgtctgctcagtacccagctccttctggctcactggcatcccagggctggagtccctacacgtctggctctccatcccctttggctccatgtacctggtggctgtggtggggaatgtgaccatcctggctgtggtaaagatagaacgcagcctgcaccagcccatgtactttttcttgtgcatgttggctgccattgacctggttctgtctacttccactatacccaaacttctgggaatcttctggttcggtgcttgtgacattggcctggacgcctgcttgggccaaatgttccttatccactgctttgccactgttgagtcaggcatcttccttgccatggcttttgatcgctacgtggccatctgcaacccactacgtcatagcatggtgctcacttatacagtggtgggtcgtttggggcttgtttctctcctccggggtgttctctacattggacctctgcctctgatgatccgcctgcggctgcccctttataaaacccatgttatctcccactcctactgtgagcacatggctgtagttgccttgacatgtggcgacagcagggtcaataatgtctatgggctgagcatcggctttctggtgttgatcctggactcagtggctattgctgcatcctatgtgatgattttcagggccgtgatggggttagccactcctgaggctaggcttaaaaccctggggacatgcgcttctcacctctgtgccatcctgatcttttatgttcccattgctgtttcttccctgattcaccgatttggtcagtgtgtgcctcctccagtccacactctgctggccaacttctatctcctcattcctccaatcctcaatcccattgtctatgctgttcgcaccaagcagatccgagagagccttctccaaataccaaggatagaaatga

SEQ ID NO: 206 - protein, 314 aa, Homo Sapiens
MLTFHNVCSVPSSFWLTGIPGLESLHVWLSIPFGSMYLVAVVGNVTILAVVKIERSLHQPMYFFLCMLAAIDLVLSTSTIPKLLGIFWFGACDIGLDACLGQMFLIHCFATVESGIFLAMAFDRYVAICNPLRHSMVLTYTVVGRLGLVSLLRGVLYIGPLPLMIRLRLPLYKTHVISHSYCEHMAVVALTCGDSRVNNVYGLSIGFLVLILDSVAIAASYVMIFRAVMGLATPEARLKTLGTCASHLCAILIFYVPIAVSSLIHRFGQCVPPPVHTLLANFYLLIPPILNPIVYAVRTKQIRESLLQIPRIEM

SEQ ID NO: 207 - DNA, 996 bp, Homo Sapiens
  CDS (1)..(993)
atgtgctggactatgccctctccatttacaggtagctctactagaaatatggagagcggaaaccaatcaacagtgactgaatttatcttcactggattccctcagcttcaggatggtagtctcctgtacttctttcctttacttttcatctatacttttattatcattgataacttattaatcttctctgctgtaaggctggacacccatctccacaaccccatgtataattttatcagtatattttcctttctggagatctggtacaccacagccaccattcccaagatgctctccaacctcatcagtgaaaagaaggccatctcaatgactggctgcatcttgcagatgtatttcttccactcacttgaaaactcagaggggatcttgctgaccaccatggccattgacagatacgttgccatctgcaaccctcttcgctatcaaatgatcatgaccccccggctctgtgctcaactctctgcaggttcctgcctcttcggtttccttatcctgcttcccgagattgtgatgatttccacactgcctttctgtgggcccaaccaaatccatcagatcttctgtgacttggtccctgtgctaagcctggcctgtacagacacgtccatgattctgattgaggatgtgattcatgctgtgaccatcatcattaccttcctaatcattgccctgtcctatgtaagaattgtcactgtgatattgaggattccctcttctgaagggaggcaaaaggctttttctacctgtgcaggccacctcatggtcttcccgatattctttggcagtgtatcactcatgtacttgcgtttcagcgacacttatccaccagttttggacacagccattgcactgatgtttactgtacttgctccattcttcaatcccatcatttatagcctgagaaacaaggacatgaacaatgcgattaaaaaactgttctgtcttcaaaaagtgttgaacaagcctggaggttaa

SEQ ID NO: 208 - protein, 331 aa, Homo Sapiens
MCWTMPSPFTGSSTRNMESGNQSTVTEFIFTGFPQLQDGSLLYFFPLLFIYTFIIIDNLLIFSAVRLDTHLHNPMYNFISIFSFLEIWYTTATIPKMLSNLISEKKAISMTGCILQMYFFHSLENSEGILLTTMAIDRYVAICNPLRYQMIMTPRLCAQLSAGSCLFGFLILLPEIVMISTLPFCGPNQIHQIFCDLVPVLSLACTDTSMILIEDVIHAVTIIITFLIIALSYVRIVTVILRIPSSEGRQKAFSTCAGHLMVFPIFFGSVSLMYLRFSDTYPPVLDTAIALMFTVLAPFFNPIIYSLRNKDMNNAIKKLFCLQKVLNKPGG

SEQ ID NO: 209 - DNA, 945 bp, Homo Sapiens
  CDS (1)..(942)
atggagacaagaaattactctgccatgactgaattctttctggtggggctttcccaatatccagagctccagctttttctgttcctgctctgcctcatcatgtacatgataatcctcctgggaaatagcctcctcattatcatcaccatcttggattctcgcctccatactcccatgtatttctttcttggaaacctctcattcttggacatctgttacacatcctcatccattcctccaatgcttattatatttatgtctgagagaaaatccatctccttcattggctgtgctctgcagatggttgtgtcccttggcttgggctccactgagtgtgtcctcctggctgtgatggcctatgaccactatgtggccatctgcaacccactgaggtactccatcatcatgaacggagtgctgtatgtgcaaatggctgcatggtcctggatcataggctgtctgacctccctattgcaaacagttctgacaatgatgttgcctttctgtgggaataatgtcattgatcatattacctgtgaaattttggcccttctaaaacttgtttgttcagatatcaccatcaatgtgcttatcatgacagtgacaaatattgtttcactggtgattcttctactgttaattttcatctcctatgtgtttattctctcttccatcctgagaattaattgtgctgagggaagaaagaaagccttctctacctgttcagcgcactcgattgtggtcatcttattctacggttcagccctttttatgtacatgaaacccaagtcaaagaacactaatacatctgatgagattattgggctgtcttatggagtggtaagcccaatgttaaatcccatcatctatagcctcaggaataaagaggtcaaagaggctgtaaagaaagtcctgagcagacatctgcatttattgaaaatgtga

SEQ ID NO: 210 - protein, 314 aa, Homo Sapiens
METRNYSAMTEFFLVGLSQYPELQLFLFLLCLIMYMIILLGNSLLIIITILDSRLHTPMYFFLGNLSFLDICYTSSSIPPMLIIFMSERKSISFIGCALQMVVSLGLGSTECVLLAVMAYDHYVAICNPLRYSIIMNGVLYVQMAAWSWIIGCLTSLLQTVLTMMLPFCGNNVIDHITCEILALLKLVCSDITINVLIMTVTNIVSLVILLLLIFISYVFILSSILRINCAEGRKKAFSTCSAHSIVVILFYGSALFMYMKPKSKNTNTSDEIIGLSYGVVSPMLNPIIYSLRNKEVKEAVKKVLSRHLHLLKM

SEQ ID NO: 211 - DNA, 954 bp, Homo Sapiens
  CDS (1)..(951)
atggaaggaaagaatcaaacagctccatctgaattcatcatcttggggttcgaccacctgaatgaattgcagtatttactcttcaccatcttctttctgacctacatatgcactttaggaggcaatgtttttatcattgtggtgaccatagctgattcccacctacacacacccatgtattatttcctaggaaatcttgcccttattgacatctgctacactactactaatgtcccccagatgatggtgcatcttctgtcagagaagaaaatcatttcctatggaggctgtgtgacccagctctttgcattcattttctttgttggctcagagtgtctcctcctggcagcaatggcatatgatcgatatattgctatctgtaagccgttaaggtactcatttattatgaacaaggccctgtgcagctggttagcagcctcatgctggacatgtgggtttctcaactcagtgttgcacaccgttctgaccttccacctgcccttctgtggtaacaatcagatcaattatttcttctgtgacatacctcccttgctcatcttgtcttgtggtgatacttccctcaatgaactggctttgctgtccattgggatcctcataagctggactcctttcctgtgcatcatcctttcctacctttacatcatctccaccatcctgaggatccgttcctctgaggggaggcacaaagccttttccacctgtgcctcccacctgctcattgttattctctattatggcagtgctatcttcacgtatgtgaggcccatctcatcttactctctagagaaagatagattgatctcagtgctgtatagtgttgtcacacccatgctgaatcctgtaatttatacgctaaggaataaggacatcaaagaggctgtgaaggccatagggagaaagtggcagccaccagttttctcttctgatatataa

SEQ ID NO: 212 - protein, 317 aa, Homo Sapiens
MEGKNQTAPSEFIILGFDHLNELQYLLFTIFFLTYICTLGGNVFIIVVTIADSHLHTPMYYFLGNLALIDICYTTTNVPQMMVHLLSEKKIISYGGCVTQLFAFIFFVGSECLLLAAMAYDRYIAICKPLRYSFIMNKALCSWLAASCWTCGFLNSVLHTVLTFHLPFCGNNQINYFFCDIPPLLILSCGDTSLNELALLSIGILISWTPFLCIILSYLYIISTILRIRSSEGRHKAFSTCASHLLIVILYYGSAIFTYVRPISSYSLEKDRLISVLYSVVTPMLNPVIYTLRNKDIKEAVKAIGRKWQPPVFSSDI

SEQ ID NO: 213 - DNA, 975 bp, Homo Sapiens
  CDS (1)..(975)
atggctgaagttaatatcatttatgtcactgtattcattctgaaaggaattaccaaccggccagagcttcaggccccgtgctttggggtgtttttagttatctatctggtcacagtgctgggcaatcttgggttgattactttaatcaagattgatactcgactccacacacctatgtactatttcctcagccacctggcctttgttgacctttgttactcctctgctattacaccgaagatgatggtgaattttgttgtggaacgcaacaccattcctttccatgcttgtgcaacccaactgggttgttttctcaccttcatgatcactgagtgtttccttctagcctccatggcctacgattgctatgtcgccatctgtagtcccctgcattattcaacactgatgtcaagaagagtctgcattcaactggtggcagttccatatatatacagcttcctggttgccctcttccacaccgttatcactttccgtctgacttactgtggcccaaacttaattaaccatttctattgtgatgacctccccttcttagctctgtcctgctcagacacacacatgaaggaaattctgatatttgcctttgctggctttgatatgatctcttcctcttccattgtcctcacctcctacatctttattattgccgctatcctaaggatccgctctactcaggggcaacacaaagccatttccacctgtggctcccatatggtgactgtcactattttctatggcacactgatctttatgtacctacagcccaaatcaaatcactccttggacacagacaagatggcttctgtattttacacagtggtgatccccatgttaaaccccctaatctatagtctaaggaacaaagaagtgaaagatgcctcaaagaaagccttggataaaggttgtgaaaacttacagatattaacatttttaaaaataagaaaactttattaa

SEQ ID NO: 214 - protein, 324 aa, Homo Sapiens
MAEVNIIYVTVFILKGITNRPELQAPCFGVFLVIYLVTVLGNLGLITLIKIDTRLHTPMYYFLSHLAFVDLCYSSAITPKMMVNFVVERNTIPFHACATQLGCFLTFMITECFLLASMAYDCYVAICSPLHYSTLMSRRVCIQLVAVPYIYSFLVALFHTVITFRLTYCGPNLINHFYCDDLPFLALSCSDTHMKEILIFAFAGFDMISSSSIVLTSYIFIIAAILRIRSTQGQHKAISTCGSHMVTVTIFYGTLIFMYLQPKSNHSLDTDKMASVFYTVVIPMLNPLIYSLRNKEVKDASKKALDKGCENLQILTFLKIRKLY

SEQ ID NO: 215 - DNA, 945 bp, Homo Sapiens
  CDS (1)..(942)
atggccagaaaagatatggctcacatcaattgcacccaggcgacagagtttattcttgtgggcctcacagaccatcaggagttgaagatgcccctctttgtgctattcttatccatctacctcttcacagtggtaggcaacttgggtttgatcctactcattagagcggatacaagtctcaacacaccaatgtacttctttcttagcaacctagcttttgtggatttctgttactcttctgtcattacacccaaaatgcttgggaatttcttgtacaaacaaaatgttatatcctttgatgcatgtgctactcaactgggctgctttctcaccttcatgatatcagaatccttgctactggcttccatggcctatgaccgatatgtggccatttgtaaccctctattgtatatggttgtaatgactccaggaatctgcattcaacttgtagcagttccttatagctatagcttcctaatggcactatttcacaccatcctcaccttccgcctctcctattgccactccaacattgtcaaccatttctattgtgatgacatgcctctcctcaggctaacttgctcagacactcgcttcaaacagctctggatctttgcctgtgctggtatcatgttcatttcctcccttctgattgtctttgtctcctacatgttcatcatttctgccatcctgaggatgcattcagctgagggaagacagaaggctttctcgacgtgtggctctcacatgctggcagtcaccatattctatgggaccctcatttttatgtacttacagcctagctctagccatgccctggacacagacaagatggcctctgtcttctacacagtgatcattcccatgttgaatcccttaatctatagcctccagaataaggaggtgaaagaagctctgaagaaaatcattatcaataaaaactag

SEQ ID NO: 216 - protein, 314 aa, Homo Sapiens
MARKDMAHINCTQATEFILVGLTDHQELKMPLFVLFLSIYLFTVVGNLGLILLIRADTSLNTPMYFFLSNLAFVDFCYSSVITPKMLGNFLYKQNVISFDACATQLGCFLTFMISESLLLASMAYDRYVAICNPLLYMVVMTPGICIQLVAVPYSYSFLMALFHTILTFRLSYCHSNIVNHFYCDDMPLLRLTCSDTRFKQLWIFACAGIMFISSLLIVFVSYMFIISAILRMHSAEGRQKAFSTCGSHMLAVTIFYGTLIFMYLQPSSSHALDTDKMASVFYTVIIPMLNPLIYSLQNKEVKEALKKIIINKN

SEQ ID NO: 217 - DNA, 930 bp, Homo Sapiens
  CDS (1)..(927)
atggagaattgtacggaagtgacaaagttcattcttctaggactaaccagtgtcccagaactacagatccccctctttatcttgttcaccttcatctacctcctcactctgtgtgggaacctggggatgatgttgctgatcctgatggactcttgtctccacacccccatgtactttttcctcagtaacctgtctctggtggactttggatactcctcagctgtcactcccaaggtcatggctgggttccttagaggagacaaggtcatctcctacaatgcatgtgctgttcagatgttcttctttgtagccttggccacggtggaaaattacttgttggcctcaatggcctatgaccgctatgcagcagtgtgcaaacccctacactacaccaccaccatgacggccagtgtaggtgcctgtctggccctaggctcatatgtctgtggcttcctaaatgcctcattccacattgggggcatattcagtctctctttctgtaaatccaatctggtacatcactttttctgtgatgttccagcagtcatggctctgtcttgctctgataaacacactagtgaggtgattctggtttttatgtcaagctttaatatcttttttgttcttctagttatctttatctcctacttgttcatattcatcaccatcttgaagatgcattcagctaagggacaccaaaaagcattgtccacctgtgcctctcacttcactgcagtctccgtcttctatgggacagtaatcttcatctacttgcagcccagctccagccactccatggacacagacaaaatggcatctgtgttctatgctatgatcatccccatgctgaaccctgtggtctacagcctgaggaacagagaagtccagaatgcattcaagaaagtgttgagaaggcaaaaatttctataa

SEQ ID NO: 218 - protein, 309 aa, Homo Sapiens
MENCTEVTKFILLGLTSVPELQIPLFILFTFIYLLTLCGNLGMMLLILMDSCLHTPMYFFLSNLSLVDFGYSSAVTPKVMAGFLRGDKVISYNACAVQMFFFVALATVENYLLASMAYDRYAAVCKPLHYTTTMTASVGACLALGSYVCGFLNASFHIGGIFSLSFCKSNLVHHFFCDVPAVMALSCSDKHTSEVILVFMSSFNIFFVLLVIFISYLFIFITILKMHSAKGHQKALSTCASHFTAVSVFYGTVIFIYLQPSSSHSMDTDKMASVFYAMIIPMLNPVVYSLRNREVQNAFKKVLRRQKFL

SEQ ID NO: 219 - DNA, 930 bp, Homo Sapiens
  CDS (1)..(927)
atgaaaaacagaaccatgtttggtgagtttattctactgggccttacaaatcaacctgaactccaagtgatgatattcatctttctgttcctcacctacatgctaagtatcctaggaaatctgactattatcaccctcaccttactagacccccacctccagacccccatgtatttcttcctccggaatttctccttcttagaaatttccttcacatccatttttattcccagatttctgaccagcatgacaacaggaaataaagttatcagctttgctggctgcttgactcagtatttttttgctatatttcttggagctaccgagttttacctcctggcctccatgtcttatgatcgttatgtggccatctgcaaacccttgcattacctgactattatgagcagcagagtctgcatacaactagtgttctgctcctggttggggggattcctagcaatcttaccaccaatcatcctgatgacccaggtagatttctgtgtctccaacattctgaatcactattactgtgactatgggcctctcgtggagcttgcctgctcagacacaagcctcttagaactgatggtcatcctcttggccgttgtgactctcatggttactctggtgctggtgacactttcttacacatacattatcaggactattctgaggatcccttctgcccagcaaaggacaaaggccttttccacttgttcctcccacatgattgtcatctccctctcttatggcagctgcatgtttatgtacattaatccttctgcaaaagaaggaggtgctttcaacaaaggaatagctgtactcattacttcggttactcccttactgaatcccttcatatatactttaagaaatcagcaagtgaaacaagctttcaaggactcagtcaaaaagattgtgaaactttaa

SEQ ID NO: 220 - protein, 309 aa, Homo Sapiens
MKNRTMFGEFILLGLTNQPELQVMIFIFLFLTYMLSILGNLTIITLTLLDPHLQTPMYFFLRNFSFLEISFTSIFIPRFLTSMTTGNKVISFAGCLTQYFFAIFLGATEFYLLASMSYDRYVAICKPLHYLTIMSSRVCIQLVFCSWLGGFLAILPPIILMTQVDFCVSNILNHYYCDYGPLVELACSDTSLLELMVILLAVVTLMVTLVLVTLSYTYIIRTILRIPSAQQRTKAFSTCSSHMIVISLSYGSCMFMYINPSAKEGGAFNKGIAVLITSVTPLLNPFIYTLRNQQVKQAFKDSVKKIVKL

SEQ ID NO: 221 - DNA, 930 bp, Homo Sapiens
  CDS (1)..(927)
atgaaaaataaaaccgtgttaactgagtttatccttctgggtctaacagatgtccctgaactccaggtggcagttttcacctttcttttccttgcgtatttactcagcatccttggaaatctgactatcctcatcctcaccttgctggactcccaccttcagactcccatgtatttctttctccggaacttctccttcttggaaatttccttcacaaacatcttcattccaagggtcctgattagcatcacaacagggaacaagagtatcagctttgctggctgcttcactcagtatttctttgccatgttccttggggctacagagttttaccttctggctgccatgtcctatgaccgctatgtggccatctgcaaacctctgcattacaccaccatcatgagcagcagaatctgcatccagctgattttctgctcttggctgggtgggctaatggctattataccaacaatcaccctgatgagtcagcaggacttttgtgcatccaacagactgaatcattacttctgtgactatgagcctcttctggaactctcatgttcagacacaagcctcatagagaaggttgtctttcttgtggcatctgtgaccctggtggtcactctggtgctagtgattctctcctatgcattcattatcaagactattctgaagctcccctctgcccaacaaaggacaaaagccttttccacatgttcttcccacatgattgtcatctccctctcttacggaagctgcatgtttatgtacattaatccctctgcaaaagaaggggatacattcaacaagggagtagctctactcattacttcagttgctcctttgttgaacccctttatttacaccctaaggaaccaacaggtaaaacaacccttcaaggatatggtcaaaaagcttctgaatctttaa

SEQ ID NO: 222 - protein, 309 aa, Homo Sapiens
MKNKTVLTEFILLGLTDVPELQVAVFTFLFLAYLLSILGNLTILILTLLDSHLQTPMYFFLRNFSFLEISFTNIFIPRVLISITTGNKSISFAGCFTQYFFAMFLGATEFYLLAAMSYDRYVAICKPLHYTTIMSSRICIQLIFCSWLGGLMAIIPTITLMSQQDFCASNRLNHYFCDYEPLLELSCSDTSLIEKVVFLVASVTLVVTLVLVILSYAFIIKTILKLPSAQQRTKAFSTCSSHMIVISLSYGSCMFMYINPSAKEGDTFNKGVALLITSVAPLLNPFIYTLRNQQVKQPFKDMVKKLLNL

SEQ ID NO: 223 - DNA, 918 bp, Homo Sapiens
  CDS (1)..(915)
atggaatttgtgttcctggcctatccctcctgcccagaactgcatattctgtccttccttggggtcagcctggtttatggtttgatcatcactgggaacattctcattgtggtgtccattcacacagaaacctgtctatgcacatccatgtactatttcctgggcagcctttctgggattgaaatatgctacactgcagtggtggtgccccatatcctggccaacaccctacagtcagagaagaccatcactctcctgggctgtgccacccagatggctttcttcattgcactgggcagtgctgattgcttcctcttggctgccatggcctatgaccgctatgtggccatttgccacccgttgcagtaccctctcctcatgacattgactctttgtgtccacttggttgtggcatcagtcatcagtggtctgttcctgtccttacaactggtggccttcatcttctctctgccattctgccaggctcagggcattgagcacttcttttgtgatgtgccaccagtcatgcatgttgtttgtgctcagagtcacattcatgagcagtcagtgctggtggcagccatactagccattgctgtgcctttcttcctcatcaccacctcctacaccttcatagtggctgctctgctcaagatccactcggctgctggccgccaccgggccttctccacctgctcttcccacctcactgtggtgctgctgcagtatggctgctgtgccttcatgtacctgtgccccagctccagctacaaccccaagcaagatcggttcatctcactggtgtacacattgggaaccccactgctcaacccacttatctatgccctgaggaacagtgagatgaaaggggccgtagggagagttcttaccaggaactgcctttcccagaacagctag

SEQ ID NO: 224 - protein, 305 aa, Homo Sapiens
MEFVFLAYPSCPELHILSFLGVSLVYGLIITGNILIVVSIHTETCLCTSMYYFLGSLSGIEICYTAVVVPHILANTLQSEKTITLLGCATQMAFFIALGSADCFLLAAMAYDRYVAICHPLQYPLLMTLTLCVHLVVASVISGLFLSLQLVAFIFSLPFCQAQGIEHFFCDVPPVMHVVCAQSHIHEQSVLVAAILAIAVPFFLITTSYTFIVAALLKIHSAAGRHRAFSTCSSHLTVVLLQYGCCAFMYLCPSSSYNPKQDRFISLVYTLGTPLLNPLIYALRNSEMKGAVGRVLTRNCLSQNS

SEQ ID NO: 225 - DNA, 939 bp, Homo Sapiens
  CDS (1)..(936)
atggaggtgaagaactgctgcatggtgacagagttcatccttttgggaatcccacacacagaggggctggagatgacactttttgtcttattcttgcccttctatgcctgcactctactgggaaatgtgtctatccttgttgctgttatgtcttctgctcgccttcacacacctatgtatttcttcctgggaaacttgtctgtgtttgacatgggtttctcctcagtgacttgtcccaaaatgctgctctaccttatggggctgagccgactcatctcctacaaagactgtgtctgccagcttttcttcttccatttcctcgggagcattgagtgcttcttgtttacggtgatggcctatgaccgcttcactgccatctgttatcctctgcgatacacagtcatcatgaacccaaggatctgtgtggccctggctgtgggcacatggctgttagggtgcattcattccagtatcttgacctccctcaccttcaccttgccatactgtggtcccaatgaagtggatcacttcttctgtgacattccagcactgttgcccttggcctgtgctgacacatccttagcccagagggtgagcttcaccaacgttggcctcatatctcttgtctgctttctgctaattcttttatcctacactagaatcacaatatctatcttaagcattcgtacaactgagggccgtcgccgtgccttctccacctgcagtgctcacctcattgccatcctctgtgcctatgggcccatcatcactgtctacctgcagcccacacccaaccccatgctgggaaccgtggtacaaattctcatgaatctggtaggaccaatgctgaaccctttgatctataccttgaggaataaggaagtaaaaacagccctgaaaacaatattgcacaggacaggccatgttcctgagagttag

SEQ ID NO: 226 - protein, 312 aa, Homo Sapiens
MEVKNCCMVTEFILLGIPHTEGLEMTLFVLFLPFYACTLLGNVSILVAVMSSARLHTPMYFFLGNLSVFDMGFSSVTCPKMLLYLMGLSRLISYKDCVCQLFFFHFLGSIECFLFTVMAYDRFTAICYPLRYTVIMNPRICVALAVGTWLLGCIHSSILTSLTFTLPYCGPNEVDHFFCDIPALLPLACADTSLAQRVSFTNVGLISLVCFLLILLSYTRITISILSIRTTEGRRRAFSTCSAHLIAILCAYGPIITVYLQPTPNPMLGTVVQILMNLVGPMLNPLIYTLRNKEVKTALKTILHRTGHVPES

SEQ ID NO: 227 - DNA, 906 bp, Homo Sapiens
  CDS (1)..(903)
atggaatttgttcttttggggttttctgatattcccaatctccactggatgctttttagtatatttttacttatgtatttgatgatcctgatgtgcaatggcatcataatactactaataaaaattcaccccgctctccagactcccatgtatttttttcttagcaatttttcccttttggaaatctgttatgtaacaatcattatcccaagaatgctcatggacatttggactcagaaaggaaatatttctttgtttgcttgtgctacacaaatgtgtttttttcttatgcttggaggcacggagtgtctccttctgacagtgatggcctatgaccgctacgtggctatttgtaagcctttgcagtatcctctagtgatgaaccacaaagtctgcattcagctgataatagcttcctggaccatcacaattcctgtagtaattggggaaacatgccaaattttccttttgcccttttgcggaactaacacaattaatcatttcttttgtgacatcccgccaatactcaagcttgcttgtggaaacatatttgtgaatgagataacagtccatgtagtagcggtggtgtttatcacggtgccatttctgttgattgttgtctcttatggcaaaattatctccaacattttgaaattgtcatcagccagaggaaaggctaaagccttctccacctgctcatctcacctaatagttgtaatcttattctttggagcaggtactatcacttatttacagcccaaaccacatcagtttcaaaggatggggaaactgatttctcttttctacaccattctgattccaactttgaatcctattatatataccctgaggaacaaagatatcatggtggcattgagaaaattactagctaagttattaacatga

SEQ ID NO: 228 - protein, 301 aa, Homo Sapiens
MEFVLLGFSDIPNLHWMLFSIFLLMYLMILMCNGIIILLIKIHPALQTPMYFFLSNFSLLEICYVTIIIPRMLMDIWTQKGNISLFACATQMCFFLMLGGTECLLLTVMAYDRYVAICKPLQYPLVMNHKVCIQLIIASWTITIPVVIGETCQIFLLPFCGTNTINHFFCDIPPILKLACGNIFVNEITVHVVAVVFITVPFLLIVVSYGKIISNILKLSSARGKAKAFSTCSSHLIVVILFFGAGTITYLQPKPHQFQRMGKLISLFYTILIPTLNPIIYTLRNKDIMVALRKLLAKLLT

SEQ ID NO: 229 - DNA, 939 bp, Homo Sapiens
  CDS (1)..(936)
atgagaggctggaatcatacaggtgcaaaggaattcctcctggtagggttaactgaaaatcctaatttgcagatcccactctttttgcttgtcactctgatttatttcatcactttgttggataatttgggtataattattttaatctggttaaatgcccaacttcatactccaatgtacttcttccttggcaacctctccttttgtgatatctgctactctactgtctttgctcctaagatgctagtcaatttcctatcaaaacataagtccagtacattttctggctgtgttctacagagtttcccttttgcagtatatgtaaccacaaaggacattctcctgtccatgatggcttatgaccattacgtggccatagctaatcccttgttgtatacagtcattatggcccaaaaagtttgtattcagatggtccttgcttcttacttaggtgggctcattaattccctgacacacacaataggtttgctcaaattagacttctgtggtcctaatattgtgaatcattatttctgtgatgttcctcctcttctgaggctttcttgctctgatgctcatatcaatgaaatgctgcccttggtcttctctgggctcattgcaatgttcactttcattgtcattatggtgtcttatatctgcatcatcattgccatccagagaatccatgcagctgagggaaggtacaaagccttctccacttgtgtctcccacctaaccacggtgaccttattctatgggtctgtttcttttagttatatccagccaagttctcagtattccttggaacaggagaaggtcttggctgtgttttatacactggtgatccccatgctaaacccacttatttatagcctgagaaataaggatgtaaaagatgcagccaaaaggttgatatggtgggggaaaaaccccacttga

SEQ ID NO: 230 - protein, 312 aa, Homo Sapiens
MRGWNHTGAKEFLLVGLTENPNLQIPLFLLVTLIYFITLLDNLGIIILIWLNAQLHTPMYFFLGNLSFCDICYSTVFAPKMLVNFLSKHKSSTFSGCVLQSFPFAVYVTTKDILLSMMAYDHYVAIANPLLYTVIMAQKVCIQMVLASYLGGLINSLTHTIGLLKLDFCGPNIVNHYFCDVPPLLRLSCSDAHINEMLPLVFSGLIAMFTFIVIMVSYICIIIAIQRIHAAEGRYKAFSTCVSHLTTVTLFYGSVSFSYIQPSSQYSLEQEKVLAVFYTLVIPMLNPLIYSLRNKDVKDAAKRLIWWGKNPT

SEQ ID NO: 231 - DNA, 933 bp, Homo Sapiens
  CDS (1)..(930)
atggactgggaaaattgctcctcattaactgatttttttctcttgggaattaccaataacccagagatgaaagtgaccctatttgctgtattcttggctgtttatatcattaatttctcagcaaatcttggaatgatagttttaatcagaatggattaccaacttcacacaccaatgtatttcttcctcagtcatctgtctttctgtgatctctgctattctactgcaactgggcccaagatgctggtagatctacttgccaagaacaagtcaatacccttctatggctgtgctctgcaattcttggtcttctgtatctttgcagattctgagtgtctactgctgtcagtgatggcctttgatcggtacaaggccatcatcaaccccctgctctatacagtcaacatgtctagcagagtgtgctatctactcttgactggggtttatctggtgggaatagcagatgctttgatacatatgacactggccttccgcctatgcttctgtgggtctaatgagattaatcatttcttctgtgatatccctcctctcttattactctcttgctcagatacacaggtcaatgagttagtgttattcaccgtctttggttttattgaactgagtaccatttcaggagttttcatttcttattgttatatcatcctatcagtcttggagatacactctgctgaggggaggttcaaagctctctctacatgcacttcccacttatctgcggttgcaattttccagggaactctgctctttatgtatttccggccaagttcttcctattctctagatcaagataaaatgacctcattgttttacacccttgtggttcccatgttgaaccccctgatttatagcctgaggaacaaggatgtgaaagaggccctgaaaaaactgaaaaatgaaattttattttaa

SEQ ID NO: 232 - protein, 310 aa, Homo Sapiens
MDWENCSSLTDFFLLGITNNPEMKVTLFAVFLAVYIINFSANLGMIVLIRMDYQLHTPMYFFLSHLSFCDLCYSTATGPKMLVDLLAKNKSIPFYGCALQFLVFCIFADSECLLLSVMAFDRYKAIINPLLYTVNMSSRVCYLLLTGVYLVGIADALIHMTLAFRLCFCGSNEINHFFCDIPPLLLLSCSDTQVNELVLFTVFGFIELSTISGVFISYCYIILSVLEIHSAEGRFKALSTCTSHLSAVAIFQGTLLFMYFRPSSSYSLDQDKMTSLFYTLVVPMLNPLIYSLRNKDVKEALKKLKNEILF

SEQ ID NO: 233 - DNA, 981 bp, Homo Sapiens
  CDS (1)..(978)
atgtcagggttgccttcagatatggatctatacaagcttcaattaaacaattttactgaagtcaccatgtttatattaataagcttcacagaagaatttgatgtgcaagtcttcctatttttattatttttagcaatctatctattcactctaataggcaatttagggctggttgtaccgatcattggggatttctggcttcacagcccaatgtactattttcttggtgttttatcattcttggatgtctgctattctacagttgtcactccaaaaatgttggtcaatttcctggcaaaaaataaatctatttcatttcttggatgtgcaacacagatgtttcttgcttgtacttttggaaccacagaatgctttctcttggctgcaatggcttatgatcgctatgtagccatctacaaccctctcctgtattcagtgagcatgtcacccagagtctatgtgccactcatcactgcttcctatgttgctagcattttacatgctactatacatacagtggctacatttagcctgtccttctgtggatccaatgaaattaggcatgtcttttgtaatatgcctcctctgcttgctatttcttgttctgacactcacgtaatccagcttctattcttctactttgtgggctctattgagatagtcactatcctgattgtcctgatctcctatggttttattctgttggccattctgaagatgcagtctgctgaagggaggagaaaagtcttctctacatgtggagctcacctaactggagtgacaatttatcatgggacaatcctcttcatgtatgtgagaccaagttccagctacacttcggacaatgacatgatagtgtcaatattttataccattgtgattcccatgctgaatcccatcatctacagtttgcggaacaaagatgtaaaggaggcaatcaaaagattgcttgtgagaaattggttcataaataagttatag

SEQ ID NO: 234 - protein, 326 aa, Homo Sapiens
MSGLPSDMDLYKLQLNNFTEVTMFILISFTEEFDVQVFLFLLFLAIYLFTLIGNLGLVVPIIGDFWLHSPMYYFLGVLSFLDVCYSTVVTPKMLVNFLAKNKSISFLGCATQMFLACTFGTTECFLLAAMAYDRYVAIYNPLLYSVSMSPRVYVPLITASYVASILHATIHTVATFSLSFCGSNEIRHVFCNMPPLLAISCSDTHVIQLLFFYFVGSIEIVTILIVLISYGFILLAILKMQSAEGRRKVFSTCGAHLTGVTIYHGTILFMYVRPSSSYTSDNDMIVSIFYTIVIPMLNPIIYSLRNKDVKEAIKRLLVRNWFINKL

SEQ ID NO: 235 - DNA, 939 bp, Homo Sapiens
  CDS (1)..(936)
atgatgggtagaaggaatgacacaaatgtggctgacttcatccttacgggactgtcagactctgaagaggtccagatggctctgtttatgctatttctcctcatatacctaattactatgctggggaatgtggggatgctattgataatccgcctggacctccagcttcacactcccatgtattttttccttactcacctgtcatttattgacctcagttactcaactgtcgtcacacctaaaaccttagcgaacttactgacttccaactatatttccttcacgggctgctttgcccagatgttctgttttgtcttcttgggtactgctgaatgttatcttctctcctcaatggcctatgatcgctatgcagcgatctgcagtcctctacactacacagttattatgtccaaaaggctctgcctcgctctcatcactgggccttatgtgattggctttatggactcctttgtcaatgtggtttccatgagcagattgcatttctgtgactcaaacataattcatcactttttctgtgacacttccccaattttagctctgtcctgcactgacacagacaacactgaaatgctgatattcattatcgctggttccaccctgatggtgtcccttatcacaatatctgcatcctatgtgtccattctctctaccatcctgaaaattaattccacttcaggaaagcagaaagctttctctacttgcgtctctcatctcttgggagtcaccatcttctatggaactatgatttttacttacttaaagccaagaaagtcttattccttgggaagagatcaagtggctcctgtgttttatactattgtgattcccatgctgaatccactcatttatagtcttagaaacagagaagtgaaaaatgctctcattagagtcatgcagagaagacaggactccaggtag

SEQ ID NO: 236 - protein, 312 aa, Homo Sapiens [sequence omitted]

SEQ ID NO: 237 - DNA, 924 bp, Homo Sapiens
  CDS (1)..(921)
atgggccaacacaatctaacagtgctaactgaattcattctgatggaactcacaaggcggcctgagctgcagattcccctttttggagtcttcctcgtcatctacctaatcacagtggtgggcaacctaactatgatcattttgaccaaactggactcccacttacatacacctatgtacttttctatcagacatttggcttttgttgatcttggtaattctactgtcatttgtcccaaggtgctggcaaattttgttgtggatcgaaatactatttcctattatgcatgtgctgcacagctggcattcttccttatgttcattatcagtgaatttttcatcctgtcagccatggcctatgaccgctatgtggccatttgtaaccctctgctctattatgttattatgtctcagcgactgtgtcatgtactggtgggcattcaatatctctacagcacatttcaggctctgatgttcactattaagatttttacattgaccttctgtggctctaatgtcatcagtcatttttactgtgatgatgttcctttgctacctatgctttgctcaaatgcacaggaaatagaattgttgagcatactattttctgtatttaatttgatctcctcctttctgatagtcttagtgtcctacatgttgattttgttagctatatgtcaaatgcattctgcagagggcaggaaaaaggctttctccacatgtggttcccatttgacagtggtggttgtgttctatgggtctctactcttcatgtacatgcagcccaattccactcacttctttgatactgataaaatggcttctgtgttttacactttagtaatccccatgcttaaccctttgatttacagcttaagaaacgaagaggtgaaaaatgccttctataagctctttgagaattga

SEQ ID NO: 238 - protein, 307 aa, Homo Sapiens
MGQHNLTVLTEFILMELTRRPELQIPLFGVFLVIYLITVVGNLTMIILTKLDSHLHTPMYFSIRHLAFVDLGNSTVICPKVLANFVVDRNTISYYACAAQLAFFLMFIISEFFILSAMAYDRYVAICNPLLYYVIMSQRLCHVLVGIQYLYSTFQALMFTIKIFTLTFCGSNVISHFYCDDVPLLPMLCSNAQEIELLSILFSVFNLISSFLIVLVSYMLILLAICQMHSAEGRKKAFSTCGSHLTVVVVFYGSLLFMYMQPNSTHFFDTDKMASVFYTLVIPMLNPLIYSLRNEEVKNAFYKLFEN

SEQ ID NO: 239 - DNA, 939 bp, Homo Sapiens
  CDS (1)..(936)
atggctgatgataattttacagttgtcactgagtttattcttttgggattgacagatcatgctgaactaaaagctgtgctttttgtggtgttcctggtgatttacgccattaccttgttgaggaatctgggcatgatcctcttaatccaaatcacctccaaactccacacacccatgtactttttactcagctgtctttcatttgtggatgcctgctattcatctgcaattgcacccaaaatgctggtgaacctcctggttgtgaaggcaacaatttctttctctgcttgcatggtacagcatttgtgtttcggagtgttcatcaccacagaaggcttcttactgtcagtgatggcctatgaccgctatgtggccattgtgagtcccttgctttacactgtagccatgtctgatagaaagtgtgtggagcttgtcacaggatcatggataggtggaatagttaacacattaatccacacaatcagcttgaggagactgtccttttgtaggctaaatgctgtcagccacttcttctgtgacattccttcactgctaaagctgtcatgttctgacacctccatgaatgagttgttgctgttaaccttctccggagtcattgccatggccaccttcttgactgtgatcatttcctacatcttcattgcttttgctagcctaaggatccactcagcatcaggcagacagcaagccttctccacctgtgcctctcacctgactgctgtgaccatattctatggtaccttaatctttagctacattcagccaagctcccagtattttgtggaacaagagaaagtggtttctatgttctatacgctagggattcccatgttaaacctgttgatacacagtttgagaaacaaggacgtaaaggaggcagtgaaaagggccatagaaatgaaacatttcctctgttaa

SEQ ID NO: 240 - protein, 312 aa, Homo Sapiens
MADDNFTVVTEFILLGLTDHAELKAVLFVVFLVIYAITLLRNLGMILLIQITSKLHTPMYFLLSCLSFVDACYSSAIAPKMLVNLLVVKATISFSACMVQHLCFGVFITTEGFLLSVMAYDRYVAIVSPLLYTVAMSDRKCVELVTGSWIGGIVNTLIHTISLRRLSFCRLNAVSHFFCDIPSLLKLSCSDTSMNELLLLTFSGVIAMATFLTVIISYIFIAFASLRIHSASGRQQAFSTCASHLTAVTIFYGTLIFSYIQPSSQYFVEQEKVVSMFYTLGIPMLNLLIHSLRNKDVKEAVKRAIEMKHFLC

SEQ ID NO: 241 - DNA, 936 bp, Homo Sapiens
  CDS (1)..(933)
atggtgtgggaaaaccagaccttcaactccatcttcatcctgctgggaatcttcaatcacagtcccacccacaccttccttttttctctggtcctgggcatcttctcactggcattgatggaaaatatttccatggttctcctcatctacatagagaaacagctccacacccccatgtacttcctcctcagtcaactgtcccttatggacctcatgctcatctgcaccactctacccaagatgatcttcagctacttgtctgggaagaaatctatctctctggcaggttgtggaactcagatattcttctatgtgtccctgcttggagctgaatgtttcttgttggctgtcatggcttatgaccgctatgtggctatatgtcaccctcttcagtacaccatcctcatgaatccgaaactctgtgtcttcatgactgttgcttcctggaccttggggtctcttgatgggatcatagtgcttgcagctgtcctgtcattttcttactgcagctctctggaaattcatcactttttctgtgatgttgctgcccttttacctctatcctgcacagaaacatctgcatttgaaagactacttgtcatttgttgtgtggtaatgctaatctttccagtttcagttatcatactttcctattcccatgtccttcgagccgtcatccacatgggctctggggaaagtcgtcgcaaggccttcactacctgctcctcccacctgtctgtggtcggactctactacggtgctgctatgttcatgtacatgagaccagcttctaaacatacgccagaccaggacaagatggtgtcggccttctacactattctcacccctatgctgaaccctctcatttatagcctccgcaacaaagaagtgttcagggcactacagaaggtactgaagaaaagaaagttaatatga

SEQ ID NO: 242 - protein, 311 aa, Homo Sapiens
MVWENQTFNSIFILLGIFNHSPTHTFLFSLVLGIFSLALMENISMVLLIYIEKQLHTPMYFLLSQLSLMDLMLICTTLPKMIFSYLSGKKSISLAGCGTQIFFYVSLLGAECFLLAVMAYDRYVAICHPLQYTILMNPKLCVFMTVASWTLGSLDGIIVLAAVLSFSYCSSLEIHHFFCDVAALLPLSCTETSAFERLLVICCVVMLIFPVSVIILSYSHVLRAVIHMGSGESRRKAFTTCSSHLSVVGLYYGAAMFMYMRPASKHTPDQDKMVSAFYTILTPMLNPLIYSLRNKEVFRALQKVLKKRKLI

SEQ ID NO: 243 - DNA, 939 bp, Homo Sapiens
  CDS (1)..(936)
atggcaagggagaattcgaccttcaactccgacttcatcctcctgggaatcttcaatcacagccccacccacaccttcctcttctttctggtcctggccatcttttcagtggccttcatgggaaactctgtcatggttctcctcatctacctggacacccagctccacacccccatgtacctcctcctcagccaactgtccctcatggacctcatgctcatctgcaccaccgtacccaagatggccttcaactacctgtctggcagcaagtccatttctatggctggttgtgccacacaaattttcttctatacatcactgcttggctctgagtgctttcttttggctgttatggcttatgaccgctacactgccatttgccaccctctaagatacaccaatctcatgagccctaaaatttgtggacttatgactgccttttcctggatcctgggctctacggatggaattattgatgttgtagcaacattttccttctcctactgtgggtctcgggaaatagcccacttcttctgtgacttcccctccctactaatcctctcatgcagtgacacatcaatatttgaaaagattcttttcatctgctgtatagtaatgattgttttccctgttgcaatcatcattgcttcctatgctcgagttatcctggctgtcattcacatgggatctggagagggtcgtcgcaaagcttttactacttgttcctctcacctcttggtggtgggaatgtactatggagcagctttgttcatgtacatacggcccacatctgatcgctccccaacacaggacaagatggtgtctgtattctacaccatcctcactcccatgttgaatcccctcatctacagcctccgcaacaaggaggtgaccagagcattcatgaagatcttaggaaagggcaagtctggagagtga

SEQ ID NO: 244 - protein, 312 aa, Homo Sapiens
MARENSTFNSDFILLGIFNHSPTHTFLFFLVLAIFSVAFMGNSVMVLLIYLDTQLHTPMYLLLSQLSLMDLMLICTTVPKMAFNYLSGSKSISMAGCATQIFFYTSLLGSECFLLAVMAYDRYTAICHPLRYTNLMSPKICGLMTAFSWILGSTDGIIDVVATFSFSYCGSREIAHFFCDFPSLLILSCSDTSIFEKILFICCIVMIVFPVAIIIASYARVILAVIHMGSGEGRRKAFTTCSSHLLVVGMYYGAALFMYIRPTSDRSPTQDKMVSVFYTILTPMLNPLIYSLRNKEVTRAFMKILGKGKSGE

SEQ ID NO: 245 - DNA, 963 bp, Homo Sapiens
  CDS (1)..(960)
atggagatgagaaatactaccccagattttattctcctaggactctttaaccacaccagagcccaccaagtcctcttcatgatgcttctggccaccgttttgacctccctgtttagcaatgccctcatgattctcctgattcactgggaccaccggctccacaggcccatgtacttcctcctgagccaactttccctcatggacatgatgctggtttccaccactgtgcccaaaatggcggctgactacttgaccggaaataaggccatctcccgcgctggctgtggtgtgcagatcttcttcctccccacactgggtggtggagagtgcttcctcttagcagccatggcctatgaccgctatgcggctgtctgccacccactccgatatcccactctcatgagctggcagctgtgcctgaggatgaccatgtcgtcctggctcctgggtgcagctgacggcctcctgcaggctgttgctaccctgagcttcccatattgcggtgcacacgagatcgatcacttcttctgcgaggcccccgtgttggtgcgtttggcttgtgctgacacttcagtcttcgaaaacgccatgtacatctgctgtgtgttaatgctcctggtccccttttccctcatcctgtcctcctatggtctcatcctcgctgctgttctgctcatgcgctctacagaagcccgcaagaaggcctttgccacctgctcttcacatgtggctgtggtgggactcttttatggagctggcatttttacctatatgagacccaaatcccacaggtccactaaccacgataaggttgtgtcagccttctatactatgttcacccctttactaaatcccctcatctacagtgtgaggaacagtgaggtcaaggaagccctgaaacggtggctggggacgtgtgtaaacctaaaacaccagcaaaatgaggcccacaggtcaagatga

SEQ ID NO: 246 - protein, 320 aa, Homo Sapiens
MEMRNTTPDFILLGLFNHTRAHQVLFMMLLATVLTSLFSNALMILLIHWDHRLHRPMYFLLSQLSLMDMMLVSTTVPKMAADYLTGNKAISRAGCGVQIFFLPTLGGGECFLLAAMAYDRYAAVCHPLRYPTLMSWQLCLRMTMSSWLLGAADGLLQAVATLSFPYCGAHEIDHFFCEAPVLVRLACADTSVFENAMYICCVLMLLVPFSLILSSYGLILAAVLLMRSTEARKKAFATCSSHVAVVGLFYGAGIFTYMRPKSHRSTNHDKVVSAFYTMFTPLLNPLIYSVRNSEVKEALKRWLGTCVNLKHQQNEAHRSR

SEQ ID NO: 247 - DNA, 939 bp, Homo Sapiens
  CDS (1)..(936)
atggcatgggagaatcagaccttcaactctgacttcctcctcctgggaatcttcaatcatagccccacccacaccttcctcttctttctggtcctggccatcttttcagtggccttcatgggaaactccatcatggttctcctcatctacctggatacccagctccacacccccatgtacttcctcctcagccaactgtccctcatggacctcatgctcatctgcaccactgtacccaagatggccttcaactacttgtctggcagcaagtccatttctatggctggctgtgccacacaaattttcttctatatatcattgcttggctccgaatgctttctgttggctgttatgtcttatgaccgctacactgccatttgccaccctctaagatacaccaatctcatgagacccaaaatttgtggacttatgactgccttctcctggatcctgggctctacagatggaatcattgatgctgtagcgacattttccttctcctactgtgggtctcgggaaatagcccacttctgctgtgacttcccttccctactaatcctctcatgcaatgacacatcaatatttgaagaggttattttcatctgctgtatagtaatgcttgttttccctgttgcaatcatcatcacttcctatgctcgagttattctggctgtcattcacatgggatctggagagggacgtcgcaaagcttttactacttgttcctctcacctcatggtggtgggaatgtactatggagcaggtttgttcatgtgcattcagcccacatctcatcattctcctatgcaggacaagatggtgtctgtattctacaccatcgtcactcccatgctgaatcctctcatttatagcctccgcaacaaggaagtgaccagagcattaatgaaaatcttaggaaagggcaagtctggagattga

SEQ ID NO: 248 - protein, 312 aa, Homo Sapiens
MAWENQTFNSDFLLLGIFNHSPTHTFLFFLVLAIFSVAFMGNSIMVLLIYLDTQLHTPMYFLLSQLSLMDLMLICTTVPKMAFNYLSGSKSISMAGCATQIFFYISLLGSECFLLAVMSYDRYTAICHPLRYTNLMRPKICGLMTAFSWILGSTDGIIDAVATFSFSYCGSREIAHFCCDFPSLLILSCNDTSIFEEVIFICCIVMLVFPVAIIITSYARVILAVIHMGSGEGRRKAFTTCSSHLMVVGMYYGAGLFMCIQPTSHHSPMQDKMVSVFYTIVTPMLNPLIYSLRNKEVTRALMKILGKGKSGD

SEQ ID NO: 249 - DNA, 963 bp, Homo Sapiens
  CDS (1)..(960)
atggagatgagaaatactaccccagattttattctcctaggactctttaaccacaccagagcccaccaagtcctcttcatgatggttctgagtatcgttttgacctccctgtttggcaattccctcatgattctcctgattcactgggaccaccggctccacacgcccatgtacttcctcctgagccaactttccctcatggacatgatgctggtttccaccactgtgcccaaaatggcggctgactacttgaccggaagtaaggccatctcccgcgctggctgtggtgtgcagatcttcttcctccccacactgggtggtggagagtgcttcctcttagcagccatggcctatgaccgctatgcggctgtctgccacccactccgatatcccactctcatgagctggcagctgtgcctgaggatgaccatgtcgtgttggctcctgggtgcagctgacgggctcctgcaggctgttgttaccctgagcttcccatattgtggtgcacacgagatcgatcacttcttctgcgagacccccgtgctggtgcgtttggcttgtgctgacacttcagtcttcgaaaacgccatgtacatctgctgtgtgttaatgctcctggtccccttttccctcatcctgtcctcctatggtctcatcctcgctgctgttctgcacatgcgctctacagaagcccgcaagaaggcctttgccacctgctcttcacatgtggctgtggtgggactcttttatggagctgccatttttacctatatgagacccaaatcccataggtccactaaccatgacaaggttgtgtcagccttctatactatgttcacccctttactaaaccccctcatctacagtgtgaagaacagtgaggtgaagggagccctgaaacggtggctggggacgtgtgtaaacataaaacaccagcaaaatgaggcccacaggtcaagatga

SEQ ID NO: 250 - protein, 320 aa, Homo Sapiens
MEMRNTTPDFILLGLFNHTRAHQVLFMMVLSIVLTSLFGNSLMILLIHWDHRLHTPMYFLLSQLSLMDMMLVSTTVPKMAADYLTGSKAISRAGCGVQIFFLPTLGGGECFLLAAMAYDRYAAVCHPLRYPTLMSWQLCLRMTMSCWLLGAADGLLQAVVTLSFPYCGAHEIDHFFCETPVLVRLACADTSVFENAMYICCVLMLLVPFSLILSSYGLILAAVLHMRSTEARKKAFATCSSHVAVVGLFYGAAIFTYMRPKSHRSTNHDKVVSAFYTMFTPLLNPLIYSVKNSEVKGALKRWLGTCVNIKHQQNEAHRSR

SEQ ID NO: 251 - DNA, 933 bp, Homo Sapiens
  CDS (1)..(930)
atggaccctggaaaccattcctcagtgactgagtccattctggctgggctctcagaacagccagagctccagctgcgcctcttcctcctgttcttaggaatctgtgtggtcacagtggtgggcaacttgggcatgatcacactgattgggctcagttctcacctgcacacacctatgtactatttcctcagcagtctgtccttcattgacttctgccattccactgtcattacccctaagatgctggtgaactttgcgacagagaagaacatcatctcctaccctgaatgcatggctcagctctatttattcagtatttttgctattgcagagtgtcacatgttggctgcaatggcgtatgactgttatgttgccatctgcagccccttgctgtacaatgtcatcatgtcctatcaccgctgcttctggctcacagtgggagtttacattttaggcatccttggatctacaattcataccagttttatgttgagactctttttgtgcaagactaatgtgattaaccattatttttgtgatcttttccctctcttggggctctcctgctccagcacctacatcaatgaattactggttctggtcttgagtgcatttaacatcctgatgcctgccttaaccatccttgcttcttacatctttatcattgccagcatcctccgcattcactccactgagggcaggtccaaagcctttagcacttgcagctcccacatcttggctgttgctgttttctttggatctgcagcattcatgtacctgcagccatcatctgtcagctccatggaccagaggaaagtgtcgtctgtgttttatactactattgtgcccatgctgaaccccctgatctacagcctgaggaataaagatgtcaaacttgccgtgaagaaaattctgcatcagacagcatgttaa

SEQ ID NO: 252 - protein, 310 aa, Homo Sapiens
MDPGNHSSVTESILAGLSEQPELQLRLFLLFLGICVVTVVGNLGMITLIGLSSHLHTPMYYFLSSLSFIDFCHSTVITPKMLVNFATEKNIISYPECMAQLYLFSIFAIAECHMLAAMAYDCYVAICSPLLYNVIMSYHRCFWLTVGVYILGILGSTIHTSFMLRLFLCKTNVINHYFCDLFPLLGLSCSSTYINELLVLVLSAFNILMPALTILASYIFIIASILRIHSTEGRSKAFSTCSSHILAVAVFFGSAAFMYLQPSSVSSMDQRKVSSVFYTTIVPMLNPLIYSLRNKDVKLAVKKILHQTAC

SEQ ID NO: 253 - DNA, 936 bp, Homo Sapiens
  CDS (1)..(936)
atggcagcagaaaaccattcttttgtgactaagtttattctggttgggctaacagagaagtcagagctacagctgcccctcttcctcgtcttcctgggaatctatgtagtcacagtgctggggaacctgggcatgatcacactgattgggctcagttctcacctgcacacacctatgtactgtttcctcagcagtctgtccttcattgacttctgccattccactgtcattacccctaagatgctggtgaactttgtgacagagaagaacatcatctcctaccctgaatgcatgactcagctctacttcttcctcgtttttgctattgcagagtgtcacatgttggctgcaatggcatatgacggctacgtggccatctgtagccccttgctgtacagcatcatcatatccaataaggcttgcttttctctgattttagtggtgtatgtaataggcctgatttgtgcgtcagctcatataggctgtatgtttagggttcaattctgcaaatttgatgtgatcaaccattatttctgtgatcttatttctatcttgaagctctcctgttctagtacttacattaatgagttactgattttaatctttagtggaattaacatccttgtccccagcctgaccatcctcagctcttacatcttcatcattgccagcatcctccgcattcgctacactgagggcaggtccaaagccttcagcacttgcagctcccacatctcggctgtttctgttttctttgggtctgcagcattcatgtacctgcagccatcatctgtcagctccatggaccaggggaaagtgtcctctgtgttttatactattgttgtgcccatgctgaaccccctgatctacagcctgaggaataaagatgtccacgttgccctgaagaaaacgctagggaaaagaacattcttatga

SEQ ID NO: 254 - protein, 311 aa, Homo Sapiens
MAAENHSFVTKFILVGLTEKSELQLPLFLVFLGIYVVTVLGNLGMITLIGLSSHLHTPMYCFLSSLSFIDFCHSTVITPKMLVNFVTEKNIISYPECMTQLYFFLVFAIAECHMLAAMAYDGYVAICSPLLYSIIISNKACFSLILVVYVIGLICASAHIGCMFRVQFCKFDVINHYFCDLISILKLSCSSTYINELLILIFSGINILVPSLTILSSYIFIIASILRIRYTEGRSKAFSTCSSHISAVSVFFGSAAFMYLQPSSVSSMDQGKVSSVFYTIVVPMLNPLIYSLRNKDVHVALKKTLGKRTFL

1. Isolated pheromone G-protein coupled receptor comprising the sequence of SEQ ID NO: 1.

2. Isolated G-protein coupled receptor having the amino acid sequence SEQ ID NO: 1 or an active portion thereof.

3. An isolated polynucleotide encoding the G-protein coupled receptor of claim 1 or 2.

4. A vector comprising the polynucleotide according to the claim 3.

5. A cell comprising the vector according to the claim 4.

6. Non-human mammal comprising a deletion of the polynucleotide according to the claim 3.

7. The non-human mammal of claim 6 wherein said animal is preferably a non-human mammal.

8. A transgenic non-human mammal which overexpresses the polynucleotide of claim 3.

9. A method for screening for compounds which bind to the receptor polypeptide molecules according to the invention, said method comprising
providing a cell containing a nucleic acid molecule encoding an olfactory/pheromone receptor of the invention or a portion thereof and expressing the receptor or portion thereof;
exposing said cell to a candidate compound; and
detecting the presence of a compound bound to said receptor or portion thereof, thereby determining whether said compound binds to said receptor or portion thereof.

10. The method of claim 9, further comprising the steps of preparing a cell extract from the cell transfected with said nucleic acid molecule; isolating a membrane fraction of the cell extract; and contacting the candidate compound with the membrane fraction under conditions permitting binding of the compound to said fraction.

11. The method of claim 9, further comprising the step of isolating and/or recovering the candidate compound which binds to the receptor.

12. A method for identifying a compound as a ligand, agonist, or antagonist of a GPCR according to the invention comprising;
providing a cell containing a nucleic acid molecule encoding an olfactory/pheromone receptor of the invention or a portion thereof and expressing the receptor or portion thereof;
exposing said cell to a candidate compound; and
detecting a signaling activity of the receptor or portion thereof, wherein if a signaling activity is detected, then the candidate compound is identified as a ligand, agonist, or antagonist of the GPCR.

13. The method of claim 12, wherein following detection of a signaling activity, said candidate compound is isolated and/or recovered.

14. Pharmaceutical composition comprising an adequate pharmaceutical carrier and a therapeutic amount of the receptor according to claim 1 or 2, the vector according to the claim 5, or the cell according to the claim 6.
